United States Patent Application Publication US 2025/0295137 A1 - sequence listing, part 8

SEQ ID NO: 8 - DNA, 1871746 bp, Latilactobacillus curvatus
  source 1..1871746: mol_type = genomic DNA
acatgaagactggtggcaagcagaaaaagcagccgtggaagccaactacgctaaaaacggtcaataaaaataaatagtttcagaataggatgatttaataaatggagaggattaaaaatacaaatttgtataatcgttttctaacatcgccaatgtacaatattgtgatgggattaaaacatcctattttgcttggacgatatttgaagtatcgaggctctgctgataaaccaaaagtagttggtcttgaaacgactttaaagcaaattacagtgcaaaaaatgtcggtcactcgttttggcgatggtgagttaaagtggctattgaatgagaatagctatgcttttcaagaaggatccgaagcattgagtgaacgtttaaaagaggttattacagcgactgatgcgcctaagttagcaatctgtataccagatgtttttaacggtctcagtcagtatatgccccaaaataaaaatgcttggattgaattaatagcgcgttacaatcatgcttggcgtccttatttacaagctcaatcagtattttatgatgcgaacatgagtcgcttctatattgaccgacgtgataaaagtcaaacggcgtattattttgaattactcaaacaaatctggcaagatcgtgaagtagttattgtagaaggacaagcaacgcgctttggtgttggtaatgatttattgagtaatgctaagtctgttaaacgcattttaggccctgcgcagaatgcgtttgatcaatacgacgctattatggatatcattaaggagcaggtagcatcagatgctttgattttaattgcattagggcccaccgcaacagttatggcttatgacttggctaagcttggttatcaggcaattgatataggacacgcagatttagagtatgagtggtatcaaatgaaggccacacaaagagttgctttaaatgatcggtatgtgaatgaagttgaaggtggaagtcaagtggctgaatcggaagctccagattatcatgctgaaattatcgcaacaatcagagaggattagttatggaatcaaaaaatcgtaatatttgtgcggtcttagttacttataaccgactagcattattgaaagaatgtttagcagcattagaaaaaaatgaaaatgttgcccacattgttattgtgaataataaaagtacggacggaacggctgattatttagcaactttatcggctgataagtttattatcaagaattctgatgaaaatctaggtggcgctggtggttttgcacatggcatggtcatggcttatgaacaaacagatgaccaatatttctggattatggatgatgacacgattcctaattcaaatgcagcacatcagttattagataaagcagcattcttaaaagatgattttggcttcttatgtagtaatgttcgctggatggatggcacatcatgtaatatgccaatgcctgcatttgaatggccagacaagattaatgatgggttagtgtctgtcagccaaggaacatttgtttcggttttcttaacccgggaaatagtaaaacaatatggcgtgccaacgcaagagcttttcatctggggagatgatactgagtatacaattcgagtcagtcaggcgaaatcatcttattttgtaattgacagtgttgtggtacacaagacacctaacaatttaacggatattactatttttaacgattcgaaggatcgtattaatcggtatttttatctatatagaaacttaatttacatcagtaagttatataaaggaaaaggggcaaccatcaaattaaccattcgtcatattctttatgcattttcaacgttaggaaaagctaaggatagtcgttttaaaagggctggtgctatcttaaaagggacgtttactggtttagggtttaatccgcagattagacgagttgattaatattagatagtaggtagggtatggaacagttattaattttaattagtgttattcaaaaaaatattttaaatatcccattcttctcacaagctgcttttttaggcatacttattattctttatcgacggttagtggaccatatttctttagaaccgttggataatttaaagcttagacactatgccttcatcgggttgcttgcacttagccaactactagcttttattggattaacaaatgaaggctatggaatcggtagtattttaaagaagttcattattgcgatgattacagttgctaattttttgattctatattttgttatgaacctattgatgcggaatgattatcagattaaaaagattgtaacggggaatttttgggcatttgtcctattgattggcatttgtctggttcaaattatttatgtatttttaggtggtcgtttagagagtatcgtcgaattaatcggacggtatctggaatatcataatattctaaatcctggttcttttgaaaaaattagttacacgcaaagtacgcaacgggtaaatgggttatatgcggaatctggatttttagcaggagtattggcgattggttttgcccccttcatcattagcgcgatgaaaaataagatcaacctattttttccgaatagtcgctatcatggctggttttattatgggttattcgctgtattgatgggcgtgttggtgcttgctaagacaagtaccggtattctggcagtcgttgtaatggcgttacttttactatgggctgtcaaaggtcgggaacggttaaatctaatcgttctgtatgttattgctggattattattagcattaatcgtaatgagagtaccagcgttaaaaaatatgttattaagttttacagttggtaagacggattctgattcaacaacaatgcggctattagcaacacaagcggtgtttattactgttttaaagaatccgttgattggtgttggctttggtcaaactagtcattttaatttcatcaatgcaccatcatcagttaaacaactagctgaatatcaattatttttaaagaataaagaatttccagatcaaagtgcgtggggagctgtgctagcgcaatttgggctgattattggaatcattattgtgatatatattattcatctattactcgatttgaaaaaatcaacgaaatggttacaaatacatcaaatcacaggatatcagtacgatcaagcgatttatgatagtgccgtttatttcacaattatcttcttagtattaggaatgttatccatccaatggtcatttgatttatttattttaatgtttttcttctttgttaactatagacactatttgaatcgtaaaatcacaaataatttaaaagatggtgaggtatatatttatgactaattatttagtagttggttctggcctgtttggcgcaaccttcgcatatgaagcggccaaacgtgggaaccatgtaaaagtaatcgaaaagcgggatcacatcgctggaaacatctatacaaaggaagttgatggcatccaagtacatcaatatggtgcccacattttccataccagcaacaaagaaatctgggaatatattaaccaattcgcagaattcaaccgttacaccaatagccctgttgccaactacaagggtgaaatctataacttgccattcaacatgaatacgttcaataagttgtggggcgtagcgacacccgctgaagcggccgctaaaattgctgaacaacgcaaggtgttaggtgataaaacacctgaaaatttggaagaacaagccatttcattaattggaacggatatctataaaaaactgatcaaaggttatactgaaaaacaatggggccaaaaagcaaccgaattaccagctttcattattcgtcgcctcccagtccgtttaacttatgacaataactacttcaacgatacataccaagggattccaattggtgggtatacacaaatcatcgaaaagatgttagatagtgatttaatcgatgttgaaactggtgttgatttcttcgataaaaaacaagaatatattgatcaatacgataaagtcatctttactgggatgattgatcagttcttcaattatcaattaggcgaacttgaataccggagcttacgttttgaaacggaagaaatggatattgataactaccaagggaacgcggttgttaactacacggacgctgaaacaccatacacgcgggtgattgaacataaacattttgaattcggtaaaggtgacaagaacaagaccatcgttaccaaagaatatcccgctaactggtcgcgtggcgacgaaccttactatccaatcaataacgataagaataaccgtttgtacaaagcttaccgtgacctatcatcgacagaacccaaagtggttttcggtggtcgtttaggccaatatcgttattatgatatgcaccaagtgatccatgcagcattacaagtcgttaaggacgaattaaaggattaatcaatgaagattattaagaactatctctataatgtgttctaccaggtatttgtactgttagtaccactcattacgatgccatatattgcccgggttttaggcccaacgggcgttgggattaactccttcaccaattcaaatacgcagtactttattttaattgggagtatcggggtatctctatatggaaatcggcaaattgcttattatcgagataatcgagcgaaagcttctcaaattttttgggaagtttttctaatgcgattagtgacgattgtggctgcattagcacttttctttggctttttatggtttgttaaagactatcatcaagcttacttgatgcaagcgattttgattgttgcggcagcatttgatatctcgtggttctttatgggctttgagaacttcaaggtaacggttttacgaaacatcatcattaagttaatctcgcttgcctgtatcttcatatttgtgaagaaccagggggatttaacgttatacattgcaattttatcaatctcgcaattgattggtaatttaacgttattcccatatttaaaacactatattgatatgcctgactggcataaattaaaaatttggcggcatttccaaccatctttagtcttgtttattccgcaaattgcgacacacgtctatttaatcttaaataagaccatggttgggaaaatggtttcggttgaagctgccggcttctatgataattccgataaaattgtcaaaatggttttagcaatcgtgacagcaacgggaactgtgatgttgccgcgagttgccaatacgtttgccaaaggtgatcacgaacaagtgaaaaagtatctttaccagtcatttgattttgtcagtgcggtttcagtccccatgatgtttgggattgcagcgattgcgccgaactttgcgaccatgttttttggcaaggatttcgccgctgttgggccattgatgatggtcgagtcgatcgtgattctaatgattgcctggagtaatgtcttgggtgtgcaatacttgatgccaaccggacacaacaaagaatttacgatttcggtgacggttggcgctgttgtcaacattatcttgaatgtgccaatgattttatggttagggacacaaggtgcaatgattgcgacagttatttcagaaatcagtgtaacggcctatcaattctatgtcgttcggcatgagttaagtattcgacaaatgacggcggaagtgtggaaataccttttaggtggtctgatgatgtttgccgtagttctttatttgaacctaacgctaccatttagtatgttacaactagttttacaagttggcgttggtattttgttatacggcgttgtattatggttaacgaaacctaaattattgaattatatcaagcgaggagatcactcatgaaaattttaatcactggtgcaaatggtcaattagggaccgaattacggcacttattagatgaaaatcaaattgaatacgtggggacagatgctactgagttagatattactgattcagcggcagtcacaacttacttcgaaaagaataagccggaattggtttatcactgtgctgcttatacagctgtcgatgctgctgaagaagaacctggcaagtcaatcaattacaaagtgaacgtggttggaacgcaaaacattgccaatgctgctgaagcaatcggcgcaacgcttgtttacattagtacggattatgtctttgatggtacgaatgatcaaatgtacacagaagaaaccccagctgcacctaagaatgaatatggtcgcacaaaattggctggtgaagaagccgttgcaaatacgatgagcaagtattacatcatccggacatcatgggtctttggtgaatatggtaagaactttgtttataccatgttaaaccttgctaaaacacatgatcatttaacggttgttagtgatcaagtcggtcggccaacttggacccggacattggctgaattcatgttatattcagttaaaaacgacgtcccttatggtttataccaactttcaaatgacaattcatgtacttggtatgaatttgcgagtgaaatcttgaaggacaaagctgttgaagtgagtcctgttacatcagacgaatatccccaaaaagccttccgtccaagacattcaattatggatttaacgaagatcaaggcaactggatttgaagtaccaacctggcaagatgcattacaaaaatttatggcaaaaatcgattagtataattaaaaaggtgagtaatcatatgattgctcaccttttttaattatactaataacgcactaaacttcttttgcaccttaaacttaatattattagccgttcgccgtgtgatgtttaagtctgcggcgatttcttttagggtggcgttgtagaagtagcggaggactaagaagcgtttttcgcgtggtgtacaaacttgatagagacgctcgaagaggtcgttacagatggcagcctcttctggattgcagtagggatcagcaacttggtcgagatagtccatcacggaatcatcatcgtttgcccggttaacgaagccaattcgtttgtcatggttattatccttgcggaaggtcatcataatcgcccatttaacggcctgatacgcgtaaaccatgaagcggtgggtttcgacttcaatattgcctgggaaatgatcgtaggcttcgacaaaggcaatgacgccaatttgatagagatcggcgaagttgctacgttgtcttggaacgtggagatctttgagaacgccatagatgagggtgtcgtcttgtataataaaatcaaaagcagtttgtaaatctgattgggtcattgtaaagcatcctgtctactatgagctcacagtgtgaattaccggtaagttcactatagcgggtttgcataaagaagggtaatcgccgattttagcggtaaatcaatccgtttcagctttaatttgcgcaaatgcattgaaatacaaatgaaaattattgtaaatagcgacttcgggttaatttataattggcgtaatttttgaattagttctttaacacttttgatatagcactgaatgtcaaatacgctgaattcggggtattcatggattacggcttggtaaatgaaattttccttatgcattttaagtgcgttgagtaatccgagtagttcagtagctgttttcggaacattcgagcacagatggcaatggcaatcatcgaagcgatggacgatgcttggcttgaaacaagtcttgagcttgatttgatagccgaaattagtggcacacacagtgagacagccaagttggactttgccaatggctgcacattgatgaatttcagtatcgatttgacggcctttataagggaggatacaggtacagtcatttagcaatgtaacgtagagatggttatcgctaacttcgtaatcacggacgtagtggagcgctaaccacggtgcgttttgatgagccgtgccacttaatggtaaatactgatattcgccattgatgtgtggaatcttacgataccaattgaaacaatggcaaaggtgccggggttgtgagaagtccatgatctgatggcgattataagcgcgcattagttgccgggtagaacgcggactaatttggagaccggttatgcggtctaacacaagactttgcgattttttatagggaataatcaccattgtgtcactcgtaatactagtttggtaagaacggggaattgacgattgatccagctcacagaagttataatcaacaccgcgcttgatgatgagtggcacaggaagacactcgtgatatgtattgatatgtttgggatgtagtagaaacatcgaagacctcctttattgttaacctcttgagaataccaatgatgggaatcgcttacaaaacaattgtgaaaagattaataaagtcctaagcgcttgttaatcttttcctcattttcggcatataattggtgcaaatccacttttttatggcatactgttattagactataagttatgggggattttagtagatgaaagtacgtaaagcagttattccagcagccggactaggcactcgttttctaccagctaccaaagcgatggcgaaggaaatgttgccaattgttgataaaccaacgattcaatttatcgtggaagaagcaaaggcttcagggattgaagatatcttaattatcactggtaagggcaaacgcccaattgaagatcactttgattcagcaccagagttggaacaaaacttgaaagccaagaataagaccgctatgttgaagatggtcaacgaaacgactgatatgggggttaacttgtacttcattcgccaatcacatccaaacggattaggggatgcagtgcgccttgcaaaatcattcgttgctgacgaaccttttgtcgttatgttaggtgatgacttgatggatgataaggtgccattgagtaaacaactaattaatgaatatgaagaaacacatgcatcacaattagccgttatgaaggtcccacataatgaagtggacaaatacggcgtgattaacccagaaaacaaagttaaagacgatttatacaacgttaagaacttcgttgaaaagccagatattgataaggcacctagtgatttagcgatcattggtcgttacttattaacccctgaaatttttgatgttttagaaaaccaaaaaccgggtcttggtggtgaaattcaattaaccgatgcgattgatgaattgaacaagacccaacgcgtcttcgcccatgaattcaaaggccggcgctacgatgttggtaacaaattcggttatctagaaacaagtatcgaatatgggttaaaacacccagaagtcaaagatgacttgaagaaatacattatcgacttggcagaagaattaaaaaaagacactaaaaaagaaaataaataacctgtaaaaaacgttcaaccactccgtacattggagtggttgaacgttttttgttgttttaaatgataagcccttcgcagtgatccacctcatgttgaataatctgtgcaatccagcctgagaaagcctgcttgtgcggcttaaaggattggtcttggtaagtgacctcgattgtttcataacgggttgtcggacgttcaccggtcaatgaaagacaaccttcagttgtttggtatggtttatcctgacgcacaatctgtggattcacaagaatcacaggtaagacgcccatttgaacgatgataatccgtttattgatgccaatcatgttggcagccattccgacgcaacgttctgtgttggcttgtaaagtatcacgtaaatcggtcagcacatcggtatcagctggtgttgctggaactgctttttgagctaagaattgagtgtcacgcataatgggtttaatcatagtagactccttgagtagtagttcttccattatagcagaaaataaactcattcaattctcatttagtgaaagtccgccttatctgcgggcttttttaatgcgattatttagggattagagtctgcttttcaatattgtggtaaaaaattcgacaaatttggattttatgcttataattattaacatactattataaaacgtctaatctaatcttaataacgcgttaagagcgatgagagaagttggtcaggcattaggggaggatcacatgaagaaattactcgtatttttaggcagctgtttactcgcaggcttatttgtatttgggagtcaagtgaataatcaggttcaagccgctgaaaaaacttatgaaatcggtacggatgtgacctatccaccattcgagtttgcgaatgagaagaatcaatatgtcggtattgatattgatatcatgaaggcagttgcgaagtccgagggctttaaagtgaatattaaaccgttgggattcaacgcagcggttcaagccgttcagtcggaacaaattgacggcgtgattgccgggatgacaattacacctgaacggcaagcaaaattcgatttcgctgatccttactacaagaccggggttgtaatggccgttcaaaaggacagtaagattaaaggcttagaagggttgcgcggtaaacgtgttgcgattaaaacagggacttccgctggggcctatgcgacggccaaagcgaaagaatatggctttaccaccgttacgtttgatgattcagataatatgtataatgatgttgtgaatggtaattcggcagcctgttttgaagacgagcccgttatgcaatatgggattaagacgggcttgaaactcaagattgtcaccaaacctgctcaaggtggcgaatatggattcgccgttaagaaagggagcaatcctgaactcattgctaaattcaataaaggtcttgctaaattaaaagcaaatggtcaatacgacaaaattaaagcaaaatatttaagtacagaatcaactaaaaaagcaaccgttgatcacagcttttttggattattgaaagaaaataaagatgcgttgttgagcggtttaggccagacgttattattaacagtcattgcgattttcttcgcaaccatttttggggtcttcttcggtttactcggcgtattacctaaccggtttgcgcgtggcgtttcagatacggtcatctatattttccgtgggttaccactcttggtgcttgcgttattcatctatactgggattccaagtttaactgggcagaagattccagcgattgtggctggggtcatcacgctgatgttcaatgaaggggcttatactgcagcctttgtcaaagggggcattggcgcggttagcaccggacaaatggaagcagcgcggagtttagggttaccatatggtaaagcaatgcggcgcgttgttttaccacaagggatccgcattatgattccatccttcattaaccaattcatcatcacattgaaagatacgtcaattttatcaatcatcgggattctcgaattgacacagacgggtaaaattatcatcgcccgcaaccttgaagggttcaaaatttgggcaatgattgccttaatctatctgatcgttatcacgttactcacgtggttatcgaagtacattgaggggagaatagataactaatgaatagaattgaagtgtctcatcttattaagaattacggcagtaacgaagtgttaaaagatttggacttaacggtcggtgataatgaagtggttgtcatgatcggcccctcaggttcaggaaagagcacgttcttgcgctgcttgaatcgcttagaagaacccacgagtggtgagattatcgttgatgggtacaacctcagtgatcctaagagtgatttgaatcaaattcgcgaaaaaatcgggatggtattccaacactttaatcttttcaaaaatctaacggtcgctgaaaatattacactcgcaccagtggaactcggtaaaatgacgccggcagaagcaaaagaaaccgccaagaaactacttgaaacggttggtttatcagagaaattcgatgcaaaaccacaatcgctatcaggtggtcaaaaacaacgggtcgccattgcgcgtgccttagcgatgaaacctgatattctcttgttcgacgaaccaacatcagcgctcgatcctgaaatggtcggcgacgtgttggccgttatgaagcggttagccaaagaagggatgacgatggttgtcgtgactcacgaaatgggctttgccaaagaagtggcagaccgcgtcatcttcatggcagatggacacattgtcgaacaaggcacaccacaggaaatctttgacaccccacaaaacgaaagaacaaaagacttcctgaacaaggtactaaatgcatagcgtgcgtttcaaaaagcacgtttaacgccaaccaaaaaagcggcccaccattacttggtgagccgcttttacgattcttaggtctttagaatgttagaatagaaataggaactagtagagaaaagagggatgacgatgcgattaggcttaaaagcagggattaacgatcagcaaattgctgatcgaatgcagtatcagccaacgtattttgaatttcatctaacagccgaagatgtcacgccaactgggctagtacgtttacgcgaaaaaattcgttatgtacgcagtcagcaggttgaacggattattttacaccacccaatgagtttcgaagggcatcatattgaactgtcgatgaatgaagcaagttcgccagcccgataccgctttttatggcaatcaacactcgatttattgcagttagcgaaagctgaagatgtccaactattggtgcatggctcttatgatgatccaattgaagaattgacgacgggttacagtaatattacggatgccattcgtgttttgttcaagcgcctcgattatttacagcggattggcggacaaaatattatgttcgaaaattcaatttcaccgattttctattatggcaatccgatttttgatcaggccatctttgataaaggttaccgcttagcgtttgatacgagtcactgttttatcaagttgcagggtgatcagaatgctttcttgcagagtctggcaactttgcgtgagcacgtcgttcattatcatctggttgattcgatgggtttgaagcatgatgggttgcaattagggactggcaaaattgactgggcccgcgtattgccattgttaaatcctgatgctagttcgatctatgagattcaattagccgatcaaaatgatgcacgagaaatgattgcgagtcatcgttatttaacgcaacttgaacaaacattatccgagtagaattttgtcagcagcaacgcgaaaaccaaacaaaggatagtcccccgtctttgtttggacatacatataatgttggtagtagtttttttgatttaataataggctaaattcccactgcttcagcggctttttgtctgcggcctttaactgcagtaatagtcgtggctgttcgtcaacgacggcgagctcaaagtgggcgataggttggagctcttcagggccttcgaagtagatgccatcgtttttgggtgtatcagctaatagctgtagtaagtcaatgacgcgcatgataagtcgtcctttctaatagtgcgaaaatcccggcaataatcagccaacaaacacccgacaagctagcggcgatggttaggataattgccattggtgttagaataccaatgagccaagtcgtggtgttgactgttggcacaaatgaaaacagaccagtaacgaggcagaccgcgatgactgtggcaataatccctggaatcgtgcctttaaaatcagctgcggataagtcaaaaccaccgatggcaatcatgctagttaagattaaccagagcaagagagcactcggttgcgtcgtccagagctggctgaacaaggggccgatggcgtttaactgccaagtgggatgttcagcaaaggtcatccacgttgcaaaagtgggccgtgctaataaccaagtcagtccgaaaatggcggctgaacaaccaaaaatcggggcaatcccaatccagagattaccaattgttggccaaagacggccggaatggtatcggtgattgacatggccaagcgagtgatcgggattatcccgtagatttaattttaagagttgtatatcgataatttggtgttggaagattaaacaggcaacagcatggctgagttcatgaatcacagtgcctaggccgccaattaaaagttgtgagtaatcccaccaatgggctaagcgccgtttagttgaacgattgattagtgttaaaatcccggcaaaagctagtggtagcgcaattaccagtaaacaattaagtaacattgattgcaatatttgcgataagttaaatgaattgggcatgataactcctttgaacgactttatgtaagcctacaccaaagtttatcgcggaaacaaggggtgttaatcaatttatgtaaaacgcaaaaaaagcccccaaatcagattcgatttgggggctgtatgctgcttaattatttgtcagaaaagattggtgtttcaatctgttcaacgtatttggcaccaactggttctttgtagagttcaattccttttttaataaacatattggctgctgcgattttagtcatcgcacttctaactgtttcggcgtctaagttgtcatcaatattgtttaagcgcaatacacgactcttagcatcactgtttttaaattctaagcaaagttgtttcatcttgaattcctcctcaaagattggtatgttttttatttagcgatataagcagatttagtggttagagtagctgttgcaaatgtgtcacctgcgtggagacttgcgagggcttcgccaactgcttggatttccgtggcttgaacgtcttcttttacggcggtcatacgacgttgtaaactttcatttggatagtctgtattttgtaattcaaaagcgatcgatgttgctaaccatgatgtttgcatgtggattcctcctaaagattagttgtaagcgtcaccggtgaatgacttacgctaatgagtaatgcacgatgccgataaaatggtaaaataatctcagcttaccaagcggatttctaaaaaaaagttaaagaaattgtgaattaccagacgtttcatgaaaatttagttatagtaataattagacttatagatgaagagggatattatgcaagaagtggttattatcagtgcaaagcggacaccgattggtaaattggggggccaacttgcaagtttaagcgcggttgaattggggacagttgctgctaaagcggcgattgaagcagccgggattgatccaactcagattgatcaagcaattttcgggaatgtcttacaagccggttctgggcaaaacgttgcacggcaaatcgctttgaagagtgggatgacacaatcaagcacagcaatgacagttaatgaagtttgtggttccggcttaaaagcgattcggttggcgcagagtgcaatcgtcatgggcgatgctgacatcgtcttagttggcggtacagaaagtatgtcacaagcgccttatttgaataaacaaatgcgttttgggagtaaatttggggaccaaacaatgattgatagcatcagtagcgaagggttaaacgatgcgtttacgcaccagccaatggggattacaggcgaaaatgtagcagctaaatacggcattacgcgtgaaatgcaagacgcttttgcactcgcttctcatcaaaaagccgcgcaagcgacccaagctggttggtttaatgaagaaattgtgcctgtaacggtgcaacaacgcaaagcaacgcttgaagtacaacaagatgaaggtatccgcccaacgacaaccatcgaagcaatggcgaagttgcgcccagcttttcaacaagatgggactgtaacacctgccaatgcttccggcattaacgatggcgcctctgccatgatcgttatgagcaaggaaaaagctgctgcactcggattagtttaccaagccactttggtcggctatcaagaagtcggtgctgatccagattacatggggtacacgccggtcgatgcaattcaaaaattattagcgcaacaaaatcaaacattagccgatatcgatttattagaaattaacgaagcgtttgccgcttcaagtgtggccgttcaaaatgggttacaagtcgatcctgctaaagttaatgtggccggtggcgctattgcgttgggccatccaatcggtgcttcaggtacgcgcatcatgacaacgttaatgcaccaattgaaacggacgcaccaaacaacagggattgcttcgttatgtattggtggcgggttaggaattgcttttgaaattcaattaaatgaggcatggtgtaatgaaaaagcctaagttctatcaattaacgaaggatgaacgtttagcaacgcttgttgaacaaggtcacctaagtcagacggatgctgattgtttagcagctgcagaacccttgtcagatgagatcgctggtaatatgattgaaaaccaaattggccagtaccaagtaccgcttggtgtggtgcaagatttattagtcaatcagcaagtctatcaagtcccgtttgcgatcgaagaaccatccgttattgcggcggctaataatgcggctaagatggcacgagctaatggcggctttgtgactgaacaactgacgcggctgatgactggtgaagtcgtgttagagaagctagttgacttagtagcggctaaagcttggattagtggcaacaatgaccatttatttgaagttgcgcgggctgcgcatccatcaattgttaaacgcggtggtggtcttcaaaaaatcacgccgacgattattgacgaccgctttttgaaacttgaattgcaaattgataccaaagaagcgatgggtgccaacattgtgaacacaatctgtgaagccatcgcacatgctgtgcaagaacagttgggcggcacccttttattgagtgttttgaccaatgccgcgtttgaatccgtggtgaccgcaagtgtgacgattgatccagctaccttaacaactgcgacgcttgctggcgaaacaattgccgaaaagatgattgcggcgagtgactttgccaaagtggatgtggcgcgcgcagcaacccacaataaagggattatgaacggcatcgatgcagtggtgttagcgacgggcaacgattggcgcgcaattgaagccggcgtgcatagttatgctgctagaaagggtgcttaccaaccgctttcgagttgggaatggacaactgatcagcaactacgcggtcgaatcgaactgccactgccagttgggatggttggcggatcgattggtattctaccaaccgtgcagattaatcagcgcttgttaaaagttcagaatgcgcgtgaattagccggcattatcgcagctgttggcttagcacaaaattttgccgcgctcaaagcacttgtgtcagacgggattcaaaaaggacacatggcgcttcaagcgaagtcgttggcgattgccgctggcgcaaccgagactgaattaacgcaattattaccattattattgaaagcgacacatttaaatacagcaacagccaccgagctgttagcgcaactgcgtgctgaaaacaaatagattggaagattattatgcaaatcggaattgataagatgggcctttttacgcctaatacctacttagatttagtgatgctagctaacgcgcgaggcgttgatcctgacaaatacacaattggaattggtcaagatcaaatggcaattgcccccctcagtcaagacagtgtcacaatggcggctaacgcggctcttgaagtgttggatgatgataatcgtgattcaattggtttattaattttaggcactgaatcaggaatcgatcagtcaaaagccggtgccctttatgtgcaacgcttattaggattaaaaaatgctcgtgcttttgaaattaaagaagcttgttacggggcaaccgctggtttgatgaccgcttatgactttgtagcggcgcatccagagcaaagagcattagtcatcggttccgatatcgcccgttatgggctggatacaccaggtgaagtgacacaaggtgctggcgcggttgcaatgatcgttagtgcagcaccacatttgttggcgttagaaccggcaacggccatccacagtgatgacattcaagatttctggcgccccaactattcaaaagaagcttttgcgcgtggcaaatattcaactgaacaatacatcgaatttttccaagcaacttgggcagactatcgcgctcaaactggccgcacaatctcagatttcaaagccttaacgttccatttaccatacacaaagatgggtttgaaggcattgcggacaatcctgccagaagcaacggaagcagaacaagcacatttattagaccgttatcaagaaagtacattgtatagccgtcaaattggtaatatctatactggcgcgttatacctaggcttcctttcattgttggaacaatcaacgcaattggcagccggcgatcgaattggtttattcagttacggttcaggtgcaatcagtgaattcttcaccggtattttgcaacccggatttgaaaaacaattagccggtgcggaccacaaagcaatgcttgctgcacgacgtcaattgacgatggctgaatacgaaaatcaattccaagcagaactaccagaagacggtagcaaatatgaaattgatttggcaatggacaacgcgccaatcattttaaaaggtgttaaggaacacgaacgcaattatcaagttagagattaataaaaaaacagctatgtatcctaaaaactgccattaacagtattgttaatggcagtttttttagctatttctgataaaaataacaagtcagaaatgatggaaaaacttttttaaatttaagagcattttgattgtatccggtcacagaaggtgctatattaatggtgaggaaagatagcttggtaagtgaaaccaagttagctttaaatagatttaccactttaaaacacaagcaccagatttgaatgtacgacacatcaagatttaaagtacgaaaaagaaattgcaaggcgtggttccaatggaaacataagtgtaactcttcgtagtattaagatctaagtatatcggaggctgatgtctgttaaagaatatcgctcaagtagtaaacacgaatttaatcgtcatcgctaaaactgcacatgcgggtcaaagatagacgaccaaactagatcgagtgaaacgattagcagtgggctagaccaacgattaaaaacaattgaatagaagtatgaggtgtaacattatccagaatgtaaaacagaatcagctcgcaacaaccaagctatcaacctcaacctaggggattcaagcatatcaaagcttgaatcctttttttatgctcaaaatacaatataaatagccattcactatagataacaaatgaatggctttatttttaattaggcgtgggcttgcactgcctcaatcaacgcgtctaaattattcacaatcgtgccgttttgtttaattaagccggttgtgtaaaggtttaagtaatggaattggttttcggcgatctcttgtaaagctgctagtttttgcggatttgtagcaccttgttggcggctgtcggtgtataatccgatcattggaatttggcgaccgtatgccacaccgatttcactagcaacgccaacatcgatggtaggaccatccaaaacagcaatgacgagatcgctagcaacgagttcgtctgtatcggcttgtgcgatcatttcagagctggcataagcattcttgtcattaattgcggcgttttcttgtgggagatagatatcgacaccaggaatcgattggcgcagttgagcaacaaccttagcgttataatcaaagtctgctgctgagaatagagcgtttgcgaaataaattttcataagaattcctccaagttgattttctttattgtatcaaattagtggtgaaatgcggtacaattaagttaatcagttttggaaggggattcacaatgcgcgagattcaagaaacaccagggcaagtaacgtttaagtcagcttggcgagattattttaaaggttattttgattttacggggcgaacaacacgtacgggttattggtgggcgatgttgattttaatgattgtttggttcatgccatttttcgctttgctatttgcacaagctgcaaaggtgcaactgaagatgagcggtgcattagtgctgtacataatcgttatcgggttgcttggggtactcacgtttattccaacgttggcgcttagtgtacggcgttatcgggatgctgggttaaatggtcgcggagcaattgtattgtggttattgaacgggtttgcatcccgttttacatcgggcaatcaggggcgcgcatggacgttaatttcggcgttaagcggaagaaagtggttgtgaaagcacgtttcaaaaagagtgcgtcacaaccgaaacgatctgagcattaaaaaatgagagtgtggcataagtcgggtatatcctgaggattaacacagaatggtgaaggattgcttcaagcaatcgtttgccattcagggttaaccggaaggatatgacttatagaacgcgtttaggcgattaaagtccaaataaaaaagcggtccatcaacatgtgtttgttgatggaccgcttttttgcgttatagatcgcgttttagtgttaatgtcacaactgcttcaactcgtgccgtttgggggaacatgtccaatggttggattttttccacttggtacgtatgcacaagggcttttaaatcccgtgcaagggttgatggattacatgagacgtagacaaatttcaatggccgactgtctaaaatggcatcaattaatttttgatctaagccagtgcgtggtggatcaaccaccaaggcagttgggacgaagccattatccaaccattctgggaggaggtcttcggcagcccctacggcatattcaacgttttgaatgtcgttgatggctgcgttgtgtttagccgcttcaattgaatcggcaatcgtgtccatgccgcgcacttctgcgacttgattggcaagactcaagccaattgtacccaccccacaataagcatcgacgaggcgatcttcaggtgtgagatcaagtgcatcttgaactaagttatacatcttagccgtttgaactggattcaattggaaaaaggcgcgggcagtcaattcgaagtgaacgtcgtttaaagtttccataatcgtttcttgaccagccagatgaatcgtttggtcgccccaaacgagcacgtttttccctttgttgatattttgcatgattgaaaccacttcgggcaattcagcttggatggctgtaatcaatgcgtgcttttgcggtagtttaggggagttggtaatgaaggtcagttgcgcttcaccggttgaaaaagattcgcgaacgaccaatgtttttaaaatcccggcattcttagtttcatcaaagacgggaattccgagtgattcgactaatttcaagacggttcggatgattttcattgttaaatcggtttgggttgcgaattcaggcaaatcaattaaagtatggctacttggagcgtataagccagctgctaaatgaccgtcgatttcgcggacttggaattgtgctttgttgcgataatgccaggggttttccattccgactgtatcggtaatattgtatttggcgtagccttgtggtttgaatttttcaagcgcttggacgacgacgtcttttttgaaggcaagttggccaggatagcttaagtgttcaagctcaatcccaccgacttggccgtaagtggcatccttaggggtaacccgttgtggtgaagcttggcgaagtttgtggacttttgcttcaatgaaacgaggggcaacgttggtgacttctgcgacaaccacttcttcaggaagtgcgcctggaataaagacaattttgcgtttgtaatagccaatcccttcaccattgatgccgattcgtttaatcgtcaatggaaaacgttggccgacttcgacttggtttgtttgttctggcatttaatccgctcctattaatataaaataatgatactcgtttttctcattgcattcagtataacagacttagcactgaaaaatcgcttcaatagtgggaattaagcagtgacttttgtccgggtgcgccatttatgctatgctacaggaagtcaaagtaaggagcgaagccacatgaatttttgggaacgaaatcaatttttaatcgccatgctgattgtactcggaattggcgtttatgccttccaacacaagagcttaccactgatcatcgggactttagtgctcgccgtcgtggtcattggatttaaagtctatttaaacatcaaagcaacacgtaacaagggagaataacatgccgaagattaccaaaataacggcacagaaaaaatcaggccgctataatatttttatcgatgagcaattcgctttcggcgtgaccgagagtgtcttgattaaataccgtttagcgaaggatttagagattgatagtcaactgcaacgcgacattcaaaaagacgatgataatgccaaagcgtatcaattggcgctcaattatctgagtcaccaattgcggacggaaaaggaactaacgcaatatttacgcgaacacgagatcactccagaagggatccagactagcttggcaaaattacgcgagttacattatatcgacgatcaggattacgccgatagctacgttcgtactgtgattaataccgcggataagggccccaaagtggtccgccagaaattaatccaaaaaggcgttagtgctgcccatatcgatcaagcacttagtcattattcagtggatgatcaagttgcggttgggttagcagctgctaagaagttggcgaagaaataccgtcatagttcattctttgaacagcagcaaaaagtcaaacaaggtttaatgcaaaaagggtttggcggtgacagccttagtttaattattgaagcgttggcccttgaagccgatgaagatagtgaagctgacgcgcttgctgaacttggtgcaaaaaaatggcgccgttatcgattactcgaaccacgagaacgccggatgaagatgcaacaagcgttgtatcggaaaggatttaatattgatgcaatcaaccacttcatcgacgaacaagaactatcagatgacaccgagtgaacgggacgcgtttcaaaccgcgtttatgacttggtatgatgaaaatcgccgggacttgccttggcgccagaatcaagagccctatcgtgtctggctatctgaaatcatgctccagcaaacgcaggttcaaacagtgattccgtactatgaacggtttttggcgacttttccaacggtggcagacttagcggccgctccagaggacttattaatgaaaacgtgggagggacttggttattattcgcgcgcgcgtaacttacaaaaagcagcgcgccaagtcgtcgacgattacaatggtcagtggccaacaaccgcggctgaattagaaaagttagccgggattggaccgtacacagcgggcgctatcgccagtatttgttttggcgaagtcgtcccggcaatcgatggcaatgcttttcgggtgttcagtcggttattgaaaatcgatgctgatattgccaacccaaagaaccgccacattttttacgatgcgattttaccgctgattcccaaagatcgcccaggtgactttaaccaagccgtgatggattttggctcgcaagtttgtacggcaaagaatccaacggttggtgagacggcgttagcaccgtttttccggagttatcaagatggtaccttattggattatccagtcaagacgaagaaagcaaaacaaaaaccagttgcgatgtttgcagttgtgattcgctcgcaaaagggcttattatttcaaaaacgaccgagtaccggtttattagcgaacctgtccacttatccactagtcgctgcggaagacttgcaagtaactgacgatgaattattgacaccggaagaacaactagctcgtatcgaagcttattttaaagaggcttttgcgctagaattgcagcaattacatgaatcaggtttaaaacctgtggtgcacgtttttacgcatcttaaatggacaattacccttttagaagcacaacttgcagcagatgccgacctcgcctttttcccaggccaatggtataccgaggcacaattagctgacgttgcattaccgactgtgcaaaagaagttagcggcacgtttggcaaccaattaatggtagaaagttttaggtaaatttgcgagtctttgctataatgataggtgattatgaataataaccttggaaagctgggtatgtcgatgagtattcccaaagaaggcgactatatagcgattcaaagttataaacacgatgggagtttacaccgcacttggcgcgatacgatggttttgaaaaccagcgagaacgcagtcattggttgtaacgatcataccttagttacagagtcagacggcagaaagtgggtcacgcgggagccggcacttatttatttccataagaagtattggtttaacgtggtggcaatgattcgtgagggcggcgtttcttattattgtaatttggcatcgccgcatgtcatggatcaagaggcgcttaagtatatcgattatgatttagatgtgaaggttttccccaatggcgaaaaacggcttctagatgtcgatgaatatgaagcgcacagtgcgcaatggcattattccgccgaaactgatcggattttaaaagccaacgttaaggttttggttgattggatcaacaatggcaaagggcccttttcgaaggaatacattgatatttggtataaccggtatcaagaattggcgcaccgtcgttagaacactatttagtctcaagcaaaaaagccccagtcattgattgactggggcttttttgtatgggttaatcgttttcgactgaagtatcttgttgaatcgttaatgttttaaagccgatgccagcaccgatgctgatggatagcaaaagcgcgaagacgcaccagccgagtaaactaccagcaatgatgttgagtggcaagaagtggcgtaacagataggttgcaaggcagaaaagaatgccatcaaaaatgaagttagcaatcttaataccaagtgaacgttctactaggaagaaacttgttaccattttaagtgtttggttaggggctaagtcagccataatcgtcaacggtcgttcgattggaactttaataaataacattagggtgctgctgattagagcactgaacaaggtgcgatcccaagtggcactgtgaatcacaagactgtcgtaagccgttgcggcaatcgtaatgacgagtagataagggataatgaagaaaaataagtggacaagaagtgatttttgcttaggcatggtaacgtcctttctgttattaagctgtgttcattataagtcatttagtggtgaaatgacaattagtcagttaattttttaaccatttcttgatgcataatcccggcatctaggaactgtggtttggcggttgcttgaaaattaagctgcgtatagaacggtactgcacttaattgagcatttaaagtgagcgttgctttgcctgattcccgagcaaaaacttcagcggcacgcatcagttcttgaccataaccatgatgccgtgctgaacggctaactgcgacacgttgaacatgataatctgagtccgcttcgatgagccgcaacgtcacaacggcttgatcagcaacgtagccgacaaaataaatcgcttggtcttcgaattcatcaatctcaagttcaggaggcacgtgttgttcaacaatgaatacggcttgccgaattgccaaactatcttgataaaccgtactttttaaatcacgagtttgtttcactaacattaaaaaaccacctcttcaaaaggaataatcaatgtgtatcactataaaatttggtacaataacaataatcgttacactatgatagcataaaatgcgttttgtgtgacataggcacactggggggatactgcatgtttgatcgtttacgccaatcaaaactattattttggtcaattgagcttttgattttggctgtgttaatctttgtttgcaccaaaattagtttcttatttgatccaattggcacctttatttcaactttatttgggccaattattggcgcgggactattattttacctgtttaacccgctaatcaatctgttaggtaaactcaaaatatcacgcaactgggcgattacgattatcttcatcgtcttttttggcggtttaattttcattgtagccactgtgattcctaacttgattaaacaaatcacacagcttgtgacgaacctaccagattttgctcatcgactgcaaaaagtagcggatgatttatctagcaatccgcgtttgaaaaacattgacttcaataaatacgtcaatcagttagatttaaaaccatcgaagattgctgaaaaagttatgaagagtttcacatctagttttggtagtatgattggtgcgattacgagcgttacagttagtgtcttcacgattccaattatgttgttctatatgttaaaagacggacaccgtttagtgcctaatattcaaaagatgttacctgatcgttataacgaccaagtggcggacttgcttcggaaaatgggggcgacgatttcagcttatatcggtggtcaagctctagagtgtttattcgttggcgtctttacatttatcggttatctcattatcgggatgccatacgcttatttgttaggatttattgctggcgtttctaacgtaattccatacttagggccttatattgggattgcgcccgcgttgattatcagtttatcaatttcgattcccaaaacaatcatggtgattgttgtcgtcattgttgttcaacaaatcgatgggaacttgatttatcctaacgtgattggccgttcattagatattcatccgctaaccatcatcattatcttattggtcgctgggaatatttatgggattttaggcatgattttagcgattccgttttatgctgttaccaagacagtgattacttatttatatgatattcaagcgttacggactaaagctaaaaaagggaccgacctttaaaagatgcaggttgaatttccatttttgactatgctatactgcaaggtaggccatattcggctaaatgtacttatttagataatgaaaggtagtggatgtgacgatgaatcctgaccctggaagttcggtgtggggacagttactgttgatattaattttgaccttagtgaatgctttttttgctgcggcagaaattgcacttgtgtcactaagtcgtgtgaagatggaggagcaagccaataaaggtgacaagaaggcgcgagtattagttcaagtcttaggtcattccaatcagtttttagcaacaattcaagttgcgattacgtttgcgggcttcttatcttcagcgagtgctgccacaaccattgcgggtagattagcaccccttttaggaaatgcggcttggacaaaggaagcggccgtattaattgtgacgattgtcttatcctatgtatccctagtttttggggaattatatcctaagcaagttgcactgcatcgtgcagaagcaattgctaaaataacggtgcaacccgtgcggatcgtcggcatcttactgcgaccattcgtgtggttgctatcaatgtcgacctcgctcttaatgaagttgacaccaattgatttttcagaaacagaaccgaagctcacccgagaagaaatggtccacatgattgaatctgggaagagtgccggtgttctggaaaccgatgaatacgaaatgttagaggggattattaccctcaataagaagatggcgcgcgaagtcatggtaccgcgaactgatgcatttatgattgatatttgtgcagacaacgatcaaaacatcgatgccatcttagcccaaccattctcccgcattccggtttatcgggatgataaggatcaagtggtgggggtcgtgcatatcaagaatctcttgaaagaagcacgccaaaaaggttttcaggctatgcaaatcgaagcggtaatgaaagaacctctttttgttcccgaaacgattacaattgatgatttattatttgaaatgaaacgcacacagcaacaaatggcaattctgttggatgaatacggtggcgttgttggcttagccacgattgaagatttattggaagaaattgttggtgaaatcgatgatgaatctgataaagctgaagaattgtaccaaaaaattgatgcgcagcattacaccgttatgggaagtatgccaatcaatgaatttaacagtgccttcaatacagatattcaagtcactgatgtggatacaattgccgggttcgtgattactgaaattggtgccattccagtcagtggtcatccggaaacaattgagctgccaggtggcatgagattaacgacggggtcggtttccggttcacggttgattgatttacaattaacgttaccagaaccagagaccgatgcaccagaagaagtcgactaaattaaatgagcacaatcaatgggacaaagggtgacgcaatggttgcgcaattctttgtcccaagcgcattatattggaataacggaaaggattttataatgacacctactgaattaaaaacggcggttgatcgtcgtcgtacttttgcaattatttctcatccggatgctggtaaaacaacgattacggaacaactcttacttttcgggggcgtgattcgtcaagccggaacagttaaagggaaaaagagtggccaatttgccaagtccgattggatggaaattgaaaagcaacgtgggatttccgttaccagttctgtgatgcaatttgattatgacgacaagcggattaatattttggatacaccgggacatgaagatttctcagaagatacgtatcggactttgatggctgttgatgcggcggtcatggtcattgattctgctaaagggattgaaccacagaccaagaaattattcaaagtctgcaaaatgcgggggattccgattttcaccttcatgaataagttggatcgcgatggtcgtgaaccacttgatttgattgctgaattggaagaactattggacatcgaaggctgtgctatgaactggccaatcgggatgggaaaagacctccgtggcctttatgatatcgccaaccgtcgaatcgaactttatcgaccagaagacgaagccaacccttatttggcccttgatgaagcaggtcggattgccggtgataatccattgaaagaagattctgtttacacacaagcccttgatgatatcgaattgatcggtgaagcaggcaatgcctatgatgctgataagattgcaacgggtgaacaaacaccaatcttctttggctctgctttgactaactttggggttaagacgttcttagaatcattcgttaacttagcgcctgccccagaagcacacaaaacacaagaagaaacgttggttgaaccaacctctcctgatttctcagggttcatcttcaagattcaagccaatatgaatccagctcatcgtgaccggattgcgttcgtacgaatttgttcgggtgaattccaacgcggaattgatgtcacattgacgcgaacaggcaagaagatgcggttgaacaattcaactgaattcatggccgacacacgggaacaagtgacaagcgctgttgctggcgatattgttggattatatgataccgggaatttccaaattggggatacgattcacacgggtaaagaggctgtttcatttgagaaactccctcaatttacccctgaattattcatgcgcgtcactgccaagaacgtgatgaaacaaaagtccttccataaagggattcaacagttggttcaagaaggggcgattcagttgtataagacttacacaactggcgattatatcttaggcgccgttggtcaattacaatttgaagtgttccaatatcggatgcaacacgaatataattctgaagtattgatggatccaatcggttcaagaactgcgcggtggatcaatccagaacaattggatgaacggatgtcatcctcacgaaatctattggtaaaagatattcatgacgaaccattgttcttatttgaaaatcaatttgcagaacgttggttccaagataagtatccagacgttgaattaaccgcaaaactataatataaagagtcaaacaaaaataagccgccgattcagacacactaactgttgtctgaatcggcggcttattttttttaggggggtatttagtcaaaagttaggaggccttccattaaccattgacctgttttaagttgacaccagcgactttgattatcgagtacaacgacttgcttaacgactacccgtgttttaggcactatctgatatgttgtgggttggtcatacggtgcttgccaaaatgttacggtattgttgttcagacttgcactgaggtttagaggggttgtttcgataactgcgtaatggtaggtgaactttggtacttggtatgattcatcactgcctttaggattagtggcatgtaattgataacgcgtaggggtaatccaagaactgccaagattgaaccattgtttgccagatggagcagttgcacagctataaatcttccaaaccgcgtgctttggcaagcgagcagcagtcagcgcttcttcacttggttgctgataggtatccgttggctcaagaagttcgatgaagggctgttcaggtgcatcgctgtgttttaaattcagcggatcatatttaaaatggacaaactgtgtcttagttgtaaagcgaccagtctgattagctgaggtgtggtgcacgaagttagcaccaccttctagtggattggcttgatagtgttcgttcaaagcacctgataaaaattggggcttaatcaacaagccaccttctaaattctggtgtaacaccattactggtgctgcgagttgcggtttataaaaaagccagatagtggtgttttcttcaggaaactgttgttttaaattggtaatagctgccaagtaataaccggcaaattttagccatggcaaattgagcacggtacccacttcacctgtcagggtcatcgttggtcgtaaagggacccgatgatgatcgaggtagtgaatggtaactgtgctatggcgcggttgtgtggacatcgtagccagcagtggcgttgcgtcctgactaacgggaacgaccggctgtttctgtgacgattgaggcgcttgacggatgggctcttgctcagagacagtttggcgtacatgactgttcggtagaggagctgcttttttcgggcgccatttcaataacgattgaagcaggttaatcagattcatacggactccttgtagcgcattacttattactactagtctatcataaattacaaaaagtgtggttgataattaacgcgtcaagtgggcataaaaaagaacccctgcaaaaatagcagtgattctaatcgtttaaatatctaatacttgtaatttagttgcagtatgggtgacgcggccgatggaaacgggaattaaggaaacgattaattctcctgtacgtgaaatgacggcgcgttctagatgcccaccaaaaacgcttgtatctaaacgggcaaagcttgcatgtagatggacatcaatcgtgccatttgcattttcgacattcccactaagggccagcagttctacttgctcttgactggaagtggcaatatattgatccgtttctggtgaataaacgctgacggtaacttcatcacaggcaccaatccccgtgatagttcccagttggttggggaaggttgcggccaaatatttaagttctgttaggatttcgtcgcccacttctaaccggcaaataatttggtgctctttttgaaaagtcttcatcgcgtcattaatcctcctaaattaggttgaaagttattatacggtacgacctattcaattgccattattttgcctatgtaaaaaaccgccccaacaaaatgaaatgtcggggcggttcgaatgattaactcactgtttttgaaggtgttggaattgtaatttcgactaatggaccatcattcaagacttcaaggccatctgtggaatctaaaccggcgagttccttcaatacaaaatcgatctcggcttgttggacatgtcgatgatcattttttaaaaggagctcacgttccttcgatgaacgcgagtcaagaaccgttgttttaccaagtgaataaaccttaacgtaggttgcggctgttgcagcgagttgttgtgaaacaagtcgcttataagaattggttacattgattaagcgcatctaaatcactccctggatgtttaagtcttaccactagtataactgaaaacgcttcatttggcacgtaattcgttttaacttgagataataaagccttttaatctgtgacctgtgaatctttagcatcggtgatttgaatctgatcttccaccaaccgagccgtcaattgtttatgttctgggtgatcgagataatagtcagccacgcgatcttcaatttgttcttgaataacacgtcgtaatggacgcgcacccatctctggattgtaaccaagatcgacaagccgtgatttgactggttcagttacggcaatgtttaacccttggtcagcaatcatcgcatttgtttgatcgagcatcagactgacaatcttcaagagattttctttgcttaatggttggaactcgatgatatcatcaaaccggtttaaaaattcaggtttaaagtagttttgtagttggtttaaaatcgagtgtgtctgaccagaaagggttgccccgaaaccaacattggcttcggcatcagtttggccggcatttgaagtcatgatgatgatggtgtctttgaagctgaccgtccgtccttgtgaatccgtcagacgaccatcgtctaagatttgtaggaacatatgcatgacgtctggatgtgctttttcaacttcatccagtaagatcaagctgtatgggttgcgccgaacttgttcggttaattgacccgcttcttcatagccaacatagccaggaggtgatccaatcaattttgacacactgaatttctccatatattcgctcatatcaaaacgaatcatagcatctgtgctaccgaaaagttctttggcgatttgttttgctaattcagttttcccgaccccggttggtccaacgaataggaaagaaccgattggtcgaccggatttgttgaaaccaattcggttgcgacgaatggaacgggcaaccttatcgactgctgaatcttgaccaattacgtgcgcttcaagattttcagcaaggttcttcaactgtgcttgttcttgtgcctttaactcaccaactggaatgtgggttttttcttcaacgattttttccatatctttgtcggtgacggttggcatttcagattggtcaatggcacttgtttcgcgcatcttggtcaattttgtgacttgatcgcggtaataagcggccttttcgtaatcctcgtcctttaacgcactttgcttttcagcttccgcattttgtaatttcttttcgatttcttttggatcgacaacggtaatcgtcaagttcttcttagagccggtttcatcaagtaagtcgatggccttatctggtaagaaacgatcctggatataacgattagaaagggttgcagccgccttaagtgcctcgtctgtgtagtggacttggtgataggcttcgtatttatcttggagtccttttagaatttggactgtttcgtcaacagaaggttcattgactgaaacgggttggagacgacgggcgagggccgcgtctttttcaatttgtcggaattcattattcgttgtggcccctactagttggagttcaccacgggcgagggcgggttttaacacgttaccggcgtccatgccaccttcggcattaccggcgcccacaatttcatgaatttcatcaatgaagagaatgtattgcttattctgcttcaattcagtcatcagttgttgcatccgttgttcgaattgaccacgaataccggtcccttgaacaagtgaaacaacatctaagcgaatgacttgtttatccttaagtttggcaggaacgtcatcgtcggcaattttttgagctaagccttcgacaacggcggttttaccgaccccagcttcaccgattaatacgggattgttttttgttcgacggtttagaatttcaataacacgatcgatttcagcatcgcgaccgatcactggatcaatttggccagctttagctaagttggttaggtttacaccgtattgactgagcagactttcgccgttttgcccgttgttgccgccaccttggccgccactttgggtttgtggcccttggtttgcttgtaattgatcatcgggagttgcgcccattgctcggaagaaactattcaggcttccaaagccaaatggatctgcatattgcccttgtggtgcttggccattactgttttgttgtttcaagagttggtaacagttttgacaaagatcgatttcttgtcgttgaccattggtgcttgtatagagatgaatcgttgcaggattcttctggcagttttgacaaagcattaatctgtcacaacctttcattaataatagaatcgtcaaagtgttcttgactatctttgacctttatccaaattataatcatctctaaaaaaagttgcaagtcaggcaactcgaaaataaaagtttcttgtcaggtatgggcggtatgcggtagtatgaggtcatcgttttatttcgcagatggaatgaaaacgaatttttcaagccacgataaaagaattgcaaaggaggcagaatggcagatgcgtgattttttagcagagatggatgccttaataaataacgaacaaactgagattgaggttgctcagtccgaatttttagattttcagaaagtatgggtcaactatgaccatcgaaaagaaattgtgggcgaagcacaacgaaatggtgcggtaatctaccgcaagtctgaaagcggtatagtgtagacggctactaattttgttagcgaaactattgtagtattttaaaaaaaatggtaatcttaaatatcggaagggtagccactactagtgaccactcatttcgttaaaaactaaatctataattagataaaaggggatcgattaatatggaaaaacgcgattttcacgtagtagcagacacaggtatccacgcacgtccagctacattattagtacaaacagcaagcaaatttaactcagatgttaacttagaatacaaaggtaaatctgtaaacttgaagtcaatcatgggtgttatgtcactcggtgttggccaaggtgctgacgttactatctcagctgaaggtgctgacgaagcagacgcaatcaacgcaattgaagaaacaatgaaaaaggaaggtttatctgaataatgacaaaactaagagggattgctgccagtgatggtatcgctacggcgaaagcctatatgttagtgcaacccgatttgtcattttcgaaatcaactatttcagattcagaaaaagagattaatcgtttgcataatgccttacaagcttccacgagtgatctagagaccattcggaagattgctgctggatcattaggggaagaagaagcacaagtttttgatgcccacatgatgattttagcagacccagaatttaccggcgctatcgaaggtaaaatcaatgatgacaaggttaatgctgagcaagcgctcaaagagatcgcggatttattcgtggccacttttgaggctatgactgataacgcatacatgcaagaacgcgctgctgacatcaaggatgttactaagcgagttctcagtcatttattaggggtaacactccctaacccagcgttaattgatgaagaagtaattgtgattgctcatgacttgacaccaagtgacacagcccaattaaacggtaaattcgttaaggcttttgtgactgatattggtggtcggacttctcactctgctattatggctcgttctttagaaattcctgcaattgttgggactgaaaatatcacaacttctgttaaagccggcgaacaattaattgtcgacgggattaacggggatgttattatcaatcctacagatgcagacattgctgaatacgataagaaggcgcaagctttcgctgatcaaaaagcagaatgggaaaagttaaagaatgaaaaatccgttacaaaagacggaaaaacattcacagttgctgcaaatatcgggacacctaaagatttagatggtgttatcgataacggtgctgaagcaatcggcttataccggacagaattcttatacatggactcatctgaattacctagtgaagatgatcagttcgaagcttataagactgttttggaaggtatggctggtaaaccagttgttgtgcggacaatggacattggtggggataagaaattaccttacttgccattacccgaagaaatgaatccattcttaggctaccgtgctgtgcggattagtttagatcgtgatgatattttcagaacacaattgcgtgctttactccgtgcttcaaactacggtaagttacgtatcatgttcccaatgatcgcaactgtcgcagaattccgtcaagcaaaaggcattcttgaagaagaaaaagctaaattaattgctgatggtcaaactgtttctgatgatttacaagttgggatgatggttgaaattccagccagcgccgtcttggcaaatcaattcgctaaggaagttgacttctttagtatcggaacaaacgacttgattcaatacacaatggctgctgatcggatgaatgaacgtgtatcatacctttatcaaccatacaatccagcaatcttacgtttaattaagaacgttattgacgcttctcataaagaaggtaagtggactggaatgtgtggggaagccgctggcgattcagtcatggcaccactccttgttggaatgggcttagatgaattttcaatgagcgcaacttcggtccttcgggttcggagcttgatgaaacgtttagatacaactcaattaactgatttagttgaaaccgctgttaatgtgaatataagtaatgaagaaaaccaaaaattagttgaagattttatgcaaaatctttaattaaatggtaaaagatcgcccactgtggcggtctttttttgtgcgtaaaatttggatgagcaaaaaagattgacagttatcgattacaaatgtaaactgtaactaatgattacaaatgtaaacgaagggagaaaaccgcgaatgactgaaaaaataggggttattacggatgcggaatgggaaattatgcggatggtttggtcacttgggcaagtcaacagcagtcatttaattgaactcgttcagcaaaagcgcgattggcaagcgtcgactgttaagactttgctaggtcggttggtaaaaaaagactatctaattgccactaaagaaggacgccgatttatatatacggccaatatcgcagaagatgaagcgatgaaccatgccacgcagtcgctgtttaaccaattatgtgggatgaaaaaaggctgcacattagccactttaattgagcaaacaacgctcagtcaaaatgatattcagacgttacaaacggtgttagcggctaaattacctagtgcaccaacaatgattgaatgtgattgtttaccagccaattgtgattgcatagaggaggaagtaaaatgaaacacgatgaaatgcaccatgaacatgaaggacacgatatgaaagagatgcatcacgagcaccaaatggatcacagcatgcacgacatgcatcatgaccatgagatgatggatcatgatatggggcatatgaatcacgatatgcatgggatgcaccatgacatgggcgacggcgatatgatgatgcatggtggtcatatgatgcacatgggaaatctaaaacaaaaattctggatttcattaattgcaacggtaccaattctaattctctcaccatttatgggcatgcagttaccttttcaaacgactttcccaggttcagattggctagtattgattttagcaacatttctcttcttttacggtggggcaccgtttttaaagggcgctcaaggagaattatctgctaagagcccagcgatgatgaccttaattgcaatggggatcagtgtttcttatctatatagtttatacgcctttgttgcgaaccatttcttgaacccacaaggccacgtgatggactttttctgggagcttgcaacgttaatcgttattatgttgttgggacactggattgaaatgaatgcggtaatgagtgcagggagtgctttagaaaaaatggctgctttgttacccggccaagcacaagtaattgatcaagcagggcatcaacacgcggttgatttaaaggacttgaaaaaaggacaaactgtattagtcgcagctggtgaaaaagtacccgcggatgggttaattatcgccggtcaaagccaagtcaatgaatccttagtgacaggtgaatcaaaggctgttgcgaaggctgaaggcgatcaagtaatcggtgggacagtcaacggaaatgggacgttaaccgtgcaagtgaccgggactggcgaaagtggttacttagcgcaagtcatgaaattaattaaacaagcacaacaagaaaaatcaaaagttgaagggttagcagataaagttgcgaagtatcttttctatgctgcattggttgctgggattatcgccttcattagttgggtgttcttggccgatctgaatacggcttttgaacggatggtaaccgtctttattattgcttgtccgcatgcacttggattggccattccattggtggttgccagaagtacagcgattgcggctacaaacggcttgctcattcgtaaccgtgaagcaatcgaattgtcagataaggttaccgttgttttgatggataagacggggactttgacacaaggcgcattcaaagtgaatgctgtcgaagttttcgatacagcacttgatgaacaacgactcatgcaactctttggtgcgttagaacgccattcaagtcatccattggccactgggattctagagtataaccaagcacaaactattcctgatttacaggcagacaatgttcaaacgattcaaggcgtcggtttgtctggaacggttgcagggcaaagttatcaaatagtgacggcaacttatttacaagcccagcatattaaatttgatcaagctcttttccaaactttagcagaaaaagggaattccatcagttatctattacaagatcaaacggttttaggactagtcgcacaaggtgatcagattaaaccagaagcgccagctttcatccaagcattaaagaaacggcatatccaaccggtcatgttaaccggtgataatcaacaagttgccgaaaaagtggctgcacaattgggcggtatgacggttcaagcgaacttgaaaccagaagataaagaagcaatcgtcaaagattaccaagctaaaggcgaagtcgtcctgatggttggggatggtgttaatgatgcaccaggtttaacgcgggctgatatcggaatcgcaattggtgctgggacggatgttgcaatcgattcagcagatgtgatcctcgtgaagagtaatccaaacgatattatgcatttcttgaatttatcgcacgcaactaaccgcaaaatgacgcaaaatctctggtggggcgctggttataatattttagcgattccattagctggggggctatttgccggaattgggttagtattaagtccagcagttggtgcaatcttaatgtcactctcaacaattgttgtggctattaatgcaatgactttgaaattaaaacgagatgcatgatgtcaatctttttttaagcagtatgaagtagatttcgataaggacgggcgaaagaaaatatcgcacacaattagacgcacacaacatatagttgtagtgcgtctttttgttggtttatctactatatataggttgaatccgaatttttaatccgctatgatggggttactgattcaaaaggagactggtgctaagatggatatgaaaattgcttcagaagcagacttgcaaattaaagtgattaaaagagatgggcgaatcatgcctttttctgcggataaaatcgaacaagcaattattaaagccgctaaaaatgtgaagacggaattagagccattagactatcaagtgttaaacacagtcgcactagatgttgtgagtgaagtcggcagccgatttgataaagatgttaaaatctatgaactgcaaaatattgtggaacataaacttttagaacatcaccaatatgatattgcccaagaatacattaactaccggacgcaacgggactttgcccggaataaggcaactgatatcaactttaccattcaaaaattattgaaaaaagaccaaactgtggtcaatgaaaatgcgaataaagatagtcatgtttttaatacacagcgggacctaacggcagggacagttgctaaagcgatggggcttaagatgttgcctgataaagtggcgaacgcccatttaaaaggcgagattcattggcacgatttggattaccaaccatatagtccaatgaccaattgttgtttaatcgattttaaagaaatgttgaatcatggctttaagattgggaatgccgaagttgaagcgccacattcgattcaaactgctacggcacaaatgtcacaaattattgctaacgttgcttctagtcaatatggtggttgttccgctgatcgggtggatgaattattggcaccatttgccgaaaagaattatgccaaacatttagcagatgccaagaattggattgatggcgaagcaaaacaaaaggattatgcgcaaaccaagactgaaaaagatatttatgacgccatgcaagcgttggaatatgaaatcaatactttatattcatcccaaggccaaacaccatttacaacgcttggttttggattaggcagtaactggattgaacgtgcgattcaaaaagcaattctttcaattcgaattgaaggattaggtaaagaaaaacggactgccatcttccctaaattagtttttgcagtaaaacgcggcttaaacttaaatccaactgatccaaattatgacatcaaacaattagctgttgaatgtgccacaaaacggatgtatcccgatgttttaatgtatgacaagttggtggaattaacgggttctttcaaagcaccaatgggttgtcgaagcttcttacaaggctggaaaaacgaacatggtgaagaagtgaatagtggccggatgaatctcggcgtggtgacaatcaatttaccacggattgcacttgaagctgatggcaaccaagctaagttctgggaaattctagaacaacggttgcaagtctgcaaggaagccctggtctttaaagtggaacgcgctaaagaagcgaagccagaaaatgcgccgattctttatgaatatggtgcctttggcaagcgtttgaagaaaaccgatagtgttgatgaagtctttaaaaattcacgcgcaactgtttcattgggctatattggcctttatgaagtcggtacagccttctttgggccagactgggaaaaggatgccaaggcaaaagcctttacggtagacgtcgttaaagacctctataatcactgcgttgattgggaaaaggaatacggctatcacttctctgtttacagcacaccagcagaaagtttaacaaatacgttctgtcaaaaagatacgcaaaaatttggcattgtcgaaaatattacagacaaagaatactacacaaatagtttccactacgatgtgcgtaaggcaccaaccccatttgaaaaattagattttgaaaaagattatccaaaatactgttctggtgggttcattcattactgtgaatacccaaatctgcgtcaaaatccaaaggctttagaagctgtctgggattatgcttacgatcgtgtcggctacttaggcacgaatacgccaattgatcaatgcttcaaatgtgggtttaaaggggactttaagccgacagaacgcgggttccaatgcccacaatgtgggaacacggatgctgctacatgtgacgtcgttaagcggacttgtggttatctaggtaatccacaacaacgtccaatggtgcatggtcggcataaggaaatcgccagtcgagttaagcacatgcatattaccattggcaacgataataacaacgttgcacggcagtaattgtgaatacgggatttgaaggagtttttgaagatggcagtaaaacaacaaggcccgaagaatccggcgcccaaagaatggctttctgaaacactaagccaggattatattgcagattataaaccgtttaactttgttgatggcgaaggggtgcgctgtagcctatatgtgagtggttgcatgtttgcttgccccggttgttacaatcgagtggcgcagaattttcgctatggccgcccttatacaactgaattagaagaccaaattattgctgatttagggcaatcttatgtccaaggactgacgttattaggtggcgaaccgttcttgaataccaagacttgtttatcgctagtagaccgaattcgcgccacttatgggcagacaaaggacgtctggtcatggacgggatatacgtgggaagaactgatgcaagaatcagatgataaactcgagttgctgtctaagattgatatcttagttgatgggcgcttcatgaaggaccaaatggatctgacattgcagttcagagggagtgccaatcaacggattatcgatgtcaaaaaatcattagccgctaaaaagcccgttatatgggcaaagcttgttcattgaaagtaatatgtaaaataaagttattaaaaatttaatttttattttccgtcattggtatatacctaacacggataaaaaagagcgtcaatccatgattagaatgggttggcgctttttttagtttttgtgaaaaactggacattcataggtaatgaacggggttatcgtttgacaacgctttctgtaacataatacttgtaatagcaattattttttaattatgattcaggaaaaggagtgaggttaatggattcatttatcagtttcatggagaaacgctttttaccagttgcggcaaaagttgggaatcaacgacatttgccattcgtgacgccttcgtaacaacgatgccattgatgatcttgggtgcttttgcaaccttgattaacaatttaccaattccggcatataccaatttcatgaacagtgtgttctcaaagacagttggtaagggcgctgaaaaggcttatatctggactaaattcgggggcaatgcttggagcgggacatttgcgattctttctgtgtttatcgtcttcctagttgcttacaatttaggtaagtcatataatatcaatccactagcagccggcgtaacagcattagggtcattctttgctgttggcggtcttgcagggatggactcaatgggcttgttcgttgctttaatcgttgcgatgatttcaacagaaattctcagacgtttattgggtaataaacacttagtcattaagatgcctgatggggtaccacctgcaattacagctaacttaaatgcgattaaagctggtaaagcagcaccatatattgttaacaaaccattctttgattcatttgttaacttaggtgggactggtgctactttaggcttaatcattgcaatctggttagtgggtcgaaagaataaacaatattcaatcgttgggaatttgagtgccgctcctggggtcttcaatattaacgaaccattaacatttggcttgcaatcgtattgaacccaattttattcatcccatatattgccacaccaatggtgatcgttacaattgcatactttgcaactagcaccgggttagtgcccgctgcaacggttatgccaccttgggtaacaccaccaattatcggtggggtcatcgcaacggttagttggcaaggtggggtattagcagcagtgaacttacttgtttcagtgctcatttacctaccattcatcaagatcgccacagacatggctttaaaagaagaagcagcccgcgatcaagcggcttaagcacaaaaaaaggtccgacatgaatgtcggaccttttttttgtgcctataattaatgagttgactcacttgcaatggtgacgtgcccgttttgaacgttaccaatgacgatattgttcgaaatctggccagcggttgcatcggttagatagttgatactatcactcatcccgacaacagcgggacctgctttgaccgtaatggttgaagctgattcaccaggcttttgttgatcaagttgctcaaaaatggtttgatcagtctgtgataaatcggcagcagctactagtgagtccgtcttttgatagcttgttgcttgaccagcaccgatgcgtagcagttcatgatcattcatgaagaggtagagataaccgatactatcaccactagcaatcgacttaggggttaattgataaccagcttgtgctgcatcccttttttgagcagcatagattgtattttgattgagcgttactaaagtgtatttggcaagatcttgaatggcagagcgttcaatactattataacgtttttggtacatgaagccatctttgaccatcagttttccggtgtcattagcactcgtcgttgttgcggccgcaatccaagtgccattgagttggtcgagggcaacaggactggctgttgttttggcggttgctttttgactgacgaataactgtccgcggtcaaaattggtgggggtttgtagatctctgtaatgagctgtaattgcgtataggcgatttcctttggcaacgaatccctggtcaattgtatttttcccagtcttagtctcaagaaagacgagatctgagaggtgtttaatcttaaagtcagcccccaatttgtgtaatgcagcgttgacttgtgccacagtcatcagatggagtgtcttttgatagctcttcatcagatgactgcggctatcttgttgccattttttaaacgaaatttgttgataattaatcggctgacttgtgaaggtgcctttagaggtcagccaacttttaggagtggtcatttgagcaatatttgaaacagtgatgtcatcagaaagaccgtttttagtttgcttagaaaggagttgtttgttaaacaaccaagtctgtgaatcggccgcgagggcttttttagttgttgtccggttggcgtaggtcgtcatagttggctgcgcgcgggatgtggttgatgaagccggttttttagcttggcaacctgctaggagtgttattgttaaaagggtagtgattaaaagtgttttacgcattttgaagctccgtttcatttgtctgcaggatgggttttgccgaataagccgtcatcgtcatccgtgttgtagtaacttaaaaaaggaaagagtagtttaaaagtggaaccactgccttgttgggagctaacggtgagttcgtgaccgagcttttcacttaaggcacgtgcaaggtagagccctaaaccggttgaacgttggttagaatagcgcccattttgaccggtgaaccctttatcaaaaatccggggtaggtcttcagccggaatcccaatccctgtatcgatgacacttaaccaaacgccttgttcgtcacgttcaatctgaaccgtaatttgtgcgccatctggggtatattttaacgcattggaaatgatttgattcaaaataaaagccagccatttagcatcggttaagacggtttgatcggcaccaagcagtttaaattggatgtgtttttgaataaaataattgcgattttggcggatgatttggttgactaaaggtttcaaatcgtattcctgcaccaagtaatccttagaaaaactatcgagacgcgagtagtagagcacttgttcaacgtagtgttcaatttggatcagttcatcggttaattgattgaatttgtcttctggaatctggtcttcgatggattcaatgagcaattgagtagctgctagggggaccttactttcgtgcacccagccatcaatgaaattcttttgatcttgttgcgctgagattagtcggtcaatgctttgttgatgataggctagcagttgattcacgtagtgttgaatgaattgtttttcagccgaggtagcgcctgtaagtggccagttgaggctatcttctttagcatctaagcgtgtttggattgtgcggtaccacttgagatggtagacgtataagccaaccaaaaaggcgcagaaaaaaagcgccagcaataaatcgaggtataaaagtgtcgccttagcaaagcgcatactagggtcgagccataggacgatatccagaacaatcataccgctgaagaaaaaagcgatatgaaataaatgatcacgtaagaattttttaaacgtcataataactccttaggggatgatatagccttggccaattttcgtctgaatgtagtcttctaaaccagcactttcaatttttttgcgaagccgattgatgttaacggttagtgtgttgtcgtcgacaaaccgttcatcgtcccagagggcacgcaataacttttcgcgactgacaatctggccgtgttgacgcatcagaaattggaggagcttatattcgtttttggaaagatcaatggtagtctcacccacctgagctccgccgctttggaggttaatcattaggccgttatgttcgatgatatcggcattttggtcgacgtagttgtaagtccgtcgtaagagggcgttaattttggcaattaaaacttccatcgaaaaaggtttattgacgaagtcatcgccgcccatgttcatcgacatcaccatgtccatgttggtactgcgactagaaatgaaaattatggggactttagatacttcacgaattttgcgacaccagtagaacccgtcataaacgggcaggttgatatcgagtaaaatcagatggggtttattggttaaaaattggtcgaaaatggtatcgaaatcggtcgtaatatttgcgtgtaattgccacttatttaagttctcagcgattaagttggcaatcgttggatcgtcttcaacaatcataatttcaaacataatgaattctcctcatacatagatagactaatattaaccactttcactagaaaagacaaccaactaaggtcgtagttataaaatgggcttttgcggtcaactctgctaaaatgaataccaattagttaagggatgtgaaaaaatggcagtcgtatcagtccaacaagtttcgaaagtctacgggcatcggtttagtctggtcaatgcgcttaataatatttcatttgatattgaaccgtgggagtttgtcggtattatgggcccttcaggcgctgggaaaacgaccttattaaatatgattgcgaccattgatcggccgacgcatggtcaagtgttaattaaagatcaagttgtgagtcggatgcgggaagctaagcttgctaattttaggcggcaagatttgggctttatttttcaagattttaacttactagattcactgacggttcgcgaaaacatgttactgccattagcgcttgataagttaagtgtgccagtgattgaaaaacggttggataaagttagccgagtcttgggcattagtagtttgttggatcgttatccggatgaagtttcaattggacagcgccaacgagtggcatgtgggcgcgcaatgattaccaatcccactttgttattggccgacgaaccaactggaagtttagattcaaaatcagctacggagcttttacaatatttaaccgtgattaatcgtcaggaaaagacgacaattttattggtcacgcatgatgcctttacagctagttactgtcggcgaattcttttcattaaagatggtcaattattctcggaaatcgttcgcaatggtgatcggcaacaattcttcaatcaaattattgatatgcaagcaaccataggtggaggaggccgtttcaatgctgttacacctaaccgttagaaatgcgattaatcatgcgcgcgactatgcggcttatgtgattgcctgtgttgccgcgattgtggtttatttctgctttacgtcgattcaaactgcgccaatctttaggcacctcaagatggctggtgaatctttagcttttggccggatgatccaagtagcaggtttaattattttgctgtttgccgcttttttcttggcatatgctaatttatttttcattaaaaggcgtcggcgggagattggtgttttaagtgtcatcggggtgactaaatttcagattagcttactcttcttctttgaaagtttgattatcggtgtgattgccctgattatcgggttgttattcgggattcttttttcgaaattattcgcgatgttattattacgcatgatggggattgcggttgccatgccgtttttaatatcatggcgggccattgaacaaacgacattcacctttggcgggttgttcctattaactggttttttaaacagtacgatgatttatcggtatcaattagtgacattgctgcaaccatctgcagtcagtcggaaagtgcgccgaccgaactggctgacttatttatgggggattattgcacctgtattgattatcagcggctattatttggcagaccaaacactggttttgatgccgagcttagagcggcgctatggttttgggattgatttggtttatttactaaccattttattacttgaaatttttggcacactggctttttttcaggcctatacgcaaatttggctacagttagaacggcactggaaacggctttattatcgtgggacacatttgttaaacgttacgaatttgagttttcgttttaaaaagaatgcaaagatgttgtggatgattacgattttaagtgcagtcactattaccgcaatcggaagtgcggcgatgatttatacgcacggtcaagatacattacggcagaacattccggtggatttggtttatacacaaagtcaaaaagcagcggtcgacaaaattttaacgcaatatcatgttcagccggttagtcaaacaatgtcttcgtttaaattggtggatgctcgatttaaggtcaattcaccgttaaatcgggaaggcatcaaaatggatggagcagctgttgtcatgccgttatcccaatacaaccaagtaatggcgcaacaatttaagttaccagcaactaaattgaagaaaaatactgtggtgaccatcattaacttgccattaacaatgctgaagatgcctcgcagagcaggtgcaggtttgccaccgaaaagagctggaatcccgttgcaattaaaacagtctgggctttcagattttcggattgtacacattcgtaagctatttccaaacggttctgatgtcttctttgatggtaacttaaacgtgattgtggccaatgatgctgaatatcaacaagtccaagcaacttcagttgatcaaatctatgcagttcagctctccgctgcccaacaaaagcaaaaacgattaatgcgcgatttattccgtctatctcaaaagcccaaacaatgggattatttaatgacgcacaaaaaagccgggcaaacccattatgaaattaaaaccactgatcaacggctagaagagttaagccgctattctgtgcttttaaaaaaacctaaccgagatattgctaacgcaaacttcggattttatatgtatgtcgccatttttattgggttaatcttcatgttagccactggtagtatcatcatgttgaaacaattgtcagaagcacaagaagagattttgcagtataaaacattgaaaaaaattgggatgagtgacggtgagattaagcgcacgatttatttccaaattttgatgctctttttactgccaattattttgggatcgatgcacgccttctttgcaattcggttattgggtttgtttttagataatcctgggttacaattagcctatatcgtttgcggcctgtttatcatcatttactttgttttctatctaattacggccaatatctacaatcgaattgtgaatgcaccgctcaatagtgatgtgttctactaaactcggagggaaagtttttgcaattagctatgtaccgcgcaaaagcgcgtcaattattaaaaggaaactggcagaaaatggccgctttagtcgcgctttggttgttagttgagatagtagtcgactcaatgattgaaggcgtgtttggcgccagttcatttggttatcaaatgctcaacacctttgccaattatttcttatactttatctttttaaatgctgttttcttaggtgtttataaagttagccagaataagcccagctattaccgggataccttattgttattccggcaaccgttgtatacccatcttgtggtattgaatcttgttcaacaagtgttaaactggatcttactattaattgggttggcgccgttttatcggttactcggttgggatcgtgtatttcaattcacttttaatggattagattccgttgcgccttatttgctaaacattagccagcaggggacaatttctgaaactgtcttattgtttgtgacggtgatgttggttttgtcactgttgcaacccgtgattttaacgtattatcagattttagtactgttgaagtttgatttaccacaagcaccactcaaattaatctttagcctttcatgggtgattttaaaagggaactggctgaaattactcgggcttactttatcatttattggatgggaactggtcgtctatatgactgctggactaggtctcttgtggttctatccatacttaattatgagcgttacgattttctatcaagaagttaaagctaagaaagtccaagtcattcaatagcattagggccgccatccatttgggtggcggtctttttttatttagttagtaaatatagtgcgcgcgatacccggaatgcgctactatagaaattagaaaggtggtcatttaaaaatgcaattaacagtcttaggttattacggtggatatccatacgccggtgttgggactagtagttatttattaacaagtggggcgtatcatttattgctagattgtgggagtggcgctttattagcgcttgagaaacaatttgacccattgcaactagatgtggtccttctcacgcactatcatcacgatcacattgctgatgtgggggttttacaatattattggcaactgcatcaaggaaccaaaaaggaacccattttacctatttacgggcatctgcaagatccactccactttggcagtttgacacaaccgggtgtgacgcagggctttggttatcaagaagacacagagctgaccctggggccgttgaaagtaactttcaaacggacagtgcatcctgtcccagcattcgctgttcgaattgaagaacaaacgacggggcaggtcttggtctttactgcagatacggcgtatttcccagaattagctgctttttgtcagtctgcagatttactgatgactgatacgaattttcttgaagatcgcactggtaaaatggcgcatatgacaacaacgcaatccggtaacttggcacaagaaagtggcgcagctaaaattctattaacgcatttaccacaaggggtttcggcagaaacgctacaggcacaagcacaagcgactgttggggacgtacccgtgatagttgcccaacaggatttgacaattgatgtcggagcgtgtaatataggcggcgttgatgaaacttacaaaaaataagtgaattttcattagaaagtagaaactactataattttttttgaatgataaatataaatgtaaaaacataaaaattaatggtgagtgggaaaatttaataataaaccgttttaattagacgttttatgtccaaatgtctatttattaattattaaaaaataattaataaatttaattttagggtagttttctagtgctgactcgcgtataataaaatttgtaagagagaaaatgattgtcttattgttaagtaaggtgtcatgttaataaaggagagagacatatggttacgttatatacatcaccaagttgtacatcttgtcgtaaagcccgggcgtggttagaggaacacaatattccataccaagaacgcaatatcttttcggagcctctcaataaaaatgaaattaaaacaatcttacgcatgaccgaagatggcacggaagaaattatctcaacgcgttctaaggttttccaagaattaaacattaaaattgatgacttatcaatcaacgaattattagatttagttcaaaagaacccagggctattacgtcgtccaattattttggatgaaaaacgacttcaggttggttataacgaagatgaaattcgtcgtttcttaccacgtgaagtacgggcattggaattacaacaagcacaattactagcaggattctagaggagagtcggggctgttaacagcctcgacttttttgatgggttaaaaaattaattgctgcgatgtagatacttgaatgttacgccagatactggtatggtaggtcaaagaaagtgaattacgacgctataagaagcgcgttagaaaggggcgttgtcccatgagaatggaaaaaatcgacgagaacacaattcgggttctattagaaaatgatgatttagaagaacgcgggattactggacttgatttgttgagcaatcataaaaagattgagcggttcttctattcaattctggaagaagtggacagtgaacacacatttgcgaacaacgatgcagtaacgttccaagtgttgcctaacgatcaagggttagaattactgattagtaagaatatgccaaactttgacggtggtaaaggtcaatcagaaatggtgcaaggcaaagacggtattactgaatacattaaagaacaactgttgaaacgagatacggtccaagatgatgcgactgaggaagaggatgaaatgaccgcttatatgaatcaagcggacaatccaatgaaacagattgtgttatcgtttaagtcatttgacgattggattgctttggcacaacagctacacatcgaaagtggtgtgtcgaacctatttctttacaaacatcagtactatgcacagattattatttttatggagaatacgaccgaagcgtttgcacgggatgatttagcggtcgctaatgaatacgggcagaagtcagaatacacagcagcttttttaagtgaattcggtgaaaaagtcatggataatagtgcgcttgagttaacacgctactacttcaaacattaaaaataacgggttttcctaaatttaggagaacccgttatttttttgcgtattttcggtgggggtgataaataatgaaagttgcacagaccactaacgggtgcttaattcgcgccgatcaagcagccaaacaacagcaagtagcgcggtatttctgtccacattgtcaacaactggttcagttgcatcgtggggtgcataaagcaccatatttcgcacatatcgcagaacgtgtatctggtggtggtgagagtccagcccatctggcgggaaaacaggcgattgctgaattagcacatgcgttgggctggcatgctacctttgaagtacctgtcggcgagacacagcgcgctgatgtatggttaacgcggaatcagcaaccattaattattgaataccaatgcagcccattgacgccagataagttaaaccaacgaacaatcggctatcagcagcgccgattacctgtattatgggtggttggtgaacggtattgttttactaaccattatttaagccagcaacagttggggtttatcaactatcggcggcagtggggcttttatgtggtaagttatttgccaaagtgggggcaatgggtgttatatcaccatattgtcgcccgtgattttgctggttatgcttggcaaaccctgcgattgacaactaaggcgtttgtgcgcttgcttgtagcacaaacaagactgccagccaatcattataagggcaagtcacagcctatgcagcaacaaattattgaccgtcgattagggctgcaagacgcacattatgttgcgttacaggcggattgttatgcccaccatgaacgcttgcaagccgttccggactggtgttactgcacacgtaatgtaccacccatttatcagctcagtcagtttgaaagtcgggtaacgtggtggttgagtgcccaaccaattgatctttttttagcggtaacgcccttactccaacaaccactactaaagcaatccttatttgcacaatgggggcaaatagctttgaaacaagcattaaaaaagaaccgggggtcggttgaccaccggttctaagattaagaaataacatgcaaagcaacccgtgagagggtgcttttttgtttttgaagtgcttggaaagtctgttcaggtgttgtttcagcacaacaggcttgtttcaagagttcataggaatcgcaattttcaatcaataagcctgattcgctttcaccttttgaatagttgaagactactgctgaaggggtcatctgaatgttcatctcacaagataattgttgatctgaatcaaatgcctgtttagtaagtggactgtgccaatcttcaagtaacatttcggtatcaagtcctacgcgtttagcaattgtaaggactaattcgttgttaagttccatatctggttcacggaatgcttgttgcagttgcattaaaaatgattggctcttcttgcccccctggaacgttgctgccttataagcgagtactgcttcataaatggtgctgaaaacgtgattacgtaagtttaaatcatgactattttgttgctgaaactgcatgtaatgctcgacgttttttaagtttaagactggaataaacttaaaatgaatatttgcatcggtttcgccgataatctttaaaagtgcctcttcggaacgtaaacaaagttgcccgattgggttgataaataaaaacacttctaacaagttggttcctccaaaatttctatattgtatatactgctcgacgcgcttgtactgtctactctaacaaaattttaaaattatgcaataagttagcttgacagagtttaagcttgatggataagggcgcgcataattttattgggtggtatttgttcacttaattgatagcgggtgacaaatgatttaaaccaagttgccccttcttggacgttggtgacttcaatttcgacttcataatcctgggtttcgtcagggtattgggtaacatcaagcgttaacaggccagcaactaaagacgcggtctggcggtgcgttgttgcctgtccccagatgaacaattctttgataatcacggcttgtgctgcaaaatagacagcgatctgaccagacgataatacggtttggtgctcaattaagtgagtagcctgctcaagtgttaggcgatcagtgatttcaatcagactatgagcattttctacggttggcacctttagcgtctgttcggcataggtgtcaaagagtcgaatacgcaacccccagtgacgtttagccaatccctggttaggcagttcgaagtaataattagtttgcacaaacggcgctgcaaatggatagtccgcttttagttgcgaaaattgcgccgccgttagcatcgtcttaaattcgcgttcaatcgtttgtgacatcggttgagctcctttttaaaaaagcaatgttattatcctagcacaaaaaagcagacttgtaatgaaatttgtatttcagacgattattatttattcaattctaatctatgttaaaatagtgctgtatgtgacagagtgaatgaggggtttataatggtcgaaaattggaagaagtttttaatgccttatgaacaggccgttagcgaattaaaaattaaattacgtgggatgcgcaagcaataccaacaaaataatgaacatgcacccatcgaatttgtaactgggcgcgttaaaccaatcgatagtatcaaagaaaagatgcaacgccgctacattacagaagatttactcgaacaagatatgcaagatatcgctggtttgcggattatgtgtcagtttgtggaagatatccatgaaattgtgggccttttgcaccaacggactgatatgaaaattgttgaagaacgggattacgtttcaaatgttaaaccaagtggttaccggtcatatcatattgtaattgaatatccagtccaactaatcagtggtgaaaaattgattttggccgagattcagattcgaacaatgtcgatgaacttttgggcaaccattgaacattcattaaattataaatatcaaggggaatttcctgaaacgctgaaggcgcggcttaaaagagcggccgaagcatcctttatgttagataaagaaatgtctgaaattcgtgaagaaattcaagaagcacaacaactcttctcatatggaaaatggcaaaacgcacttgaaaaggcaactgaaaatgattctgaaggagagacgccagattgaaagtaacggtatttagcaatgacggtagttcttccgttcaagttgccaatcgcttaatgcaaaaattgatcaatacggggtttgtcattgatgatcaaacgcccgatgtggtcatttcagttggtggagatgggacgcttttatctgcctttcatcggtacgcccacgatttagcgcacatccggtttattggcgtgcacacgggacatttagggttttacactgactggcgcgattttgaagtcgatgatctagtcgtcgccttgcaagaagatctcgggcagagtattagctatccgttattagaagttaaaatcgaatatgcggatacgcacgaaatcagtcgcagtttggcgctcaatgaagtgacgttacgtcggtatgcagcgactttgcggacagacgtttacattaaagagaatttttttgaaagttttaggggcgatgggctctgtatttccacaccaactgggtcgacagcttatagtaagtcgattggtggcgcggttttacatccacgcttagacgcgatgcagatgaccgaaattgcgtcgattaataatcgcgtatatcgaacactatcggcaccaatcgtgttaccatcggatgaatggttgctcctgaagccttctaagacaagtgattacgttgtgacaattgatcaattcacatttaaggatcgaccaattgcctcgatgcaatttaaaattgcaaaggaaagaatacagtttgcacgttatcgacacacccatttctggaaccgtgtcgaagatgcatttattgggtcaaaacatgaaatttgaatggcaatatcaagatgcagaaggctgtgtgttgcggaattttttacggcggcataagctttctcgcagtcagttaactaaaattaaatttgcaggtggcacaatcctcgtcaacggccaggaggcacataccaatgcccaactggttcaaaacgatgtggtgactgtttacctcgcaccggaagtggccgtcgaacacgtcatcccagttaaaggggacttgaaagtggtttttgaagacgaccattttttagtggtcgataaaccggcgtttgtggcgtcgttaccggcaccgaaccatccgcacaacacaatggccaatttcgtcaaacaatacttgattgaccaaaatgctgagagccaggcagtgcacgtagtaacgcgcctcgatcgcgatacaagtggtttgatgatgttcaccaagcacggcttcgcgcatagtttgttggataagcaactccaatctaaagaattgcaaaaaacatatgttgcgattgccagtggtgatatgcggttagattatccgcaacatgcgtggattgatcggccaatcaaacggtcggatgatttttacatgcggcgggtcgttggggttggtggcaaacgctcattaacggaatattggcaagaagcccatggcaccgatgccacgttagttaagttgaagttactaacaggtcggacacatcagattcgggttcattttgcatcactggggcatcccttaattggtgataatttatacggtgtggccgatgatttattaccgcgtcaagcattgcactgtcgcgagttaacgttctatcatccatttgaagaacggtatgtcacggttcaaagcgaactaccagccgattttcaagcagtgatggatcaacgtcatttggcttttcctgcgggcgaattgaataaaatttgattaagctttcaatttgagtcgcaatctaactttagaatgagtatactaataaacgattatggattacggagggattagtattgtgttaactttaaatatgattaagacaatcattttagggattgtcgaaggttttacagaatggctaccaattagttcaaccggccatttagtgttggtcggtagtgttttgaaacttgatgaatcaaaagcattcatcgatatgtttaattatgtgattcaatttggagcgattatggcggttgtgattctatacttccataaattgaatcctttctcaccacgtaagaaccagctcgaacaaaaacaaacgtggacgttatggtttaaggtaattgtggcggtgattccatcagtcattattggattcccattgaatgactggatggatgaacatctgatgaaaaactggattgtggccagcatgttgattttatacggggttttgttcatcgtcatcgaaaatcgcaacaagcataccacaccgaaatttgctgatttaaatacgttaccttggttgacggccttttggattggctgtttccaagccttatcaattattcctgggacatcccgttcaggcgctacgattttaggggcaattattttagggacatcacggtttgtgggtgcggaattctcgttcttcatggcgattccaacgatggtcggcgtggcaatcttgaagattggtaaattcttgtaccaaggcaatacgtttacgggcgatcaatcaatcattttattagtcgggatgttggtttcattcatcgtttcaattatttcaatcaaattcttgatggattacatcaagaaacatgatttcaaggtcttcggttggtaccggattatcttgggcctacttgtcttaggtgcaatgctatttgcataaaggattaaattaaaatttggagggttcatccatgttaatcaaagaagtttgtgttgaaaatttcactaaaattccggcagcaatccgcaatggtgctaaacgaattgagttgaacgacaacttggctgtcggaggcacaacggttagccggggtgtgatggctgaatcagtgcgttatgcgcatgaacacgatgtaccagtgatggtcatgattcgtccgcgtggcggcaactttgtttataacgatcaagaattaaaaattatggaagctgatatcttttcagcgcaagaattaggcgctgacggcatcgtccttggttgcctaacacctgacaatcaaatcgacgaagaagcgatggaaatgttgattggtgctgccaatgggatgcaagttgttttccatatggctttcgatgaaattgcggctgatcaacaagctgcagcaatggaatggctgattgatcatgatgttaaacggattttaacgcatggggggccgttagacgcgcccatcgacgaagcccgtttaaaaacgttaattcaagctgctgatgggcggattgtgattttacctggcggtggcattacagccgacaatgtcgacgcgttaacagaacgtttacaaatttccgaagcacacggtacaaaagtggtcgggacattataagatagtaaaaggcccagtcatcaatgatgactgggcctttttttaatgtttaaataggagataatcgactgacgacgcactctaaacgtgttcacccagtcatctctttccggttagcgacgattgtcaaacgattgctttcagcaatcattcgccagtctaggctaatcctcaagagatacccgactgggatcacactctaaacgtgctctgtaaggcatccgcttccggttaaccctgagccgcaaacgattacgttgtaatcattcacgacgctgtgttaatcctcagcggatattcgccttacgacgcactctaaattttttctatcgctaggacttgtccttggtcggcgttgattgccttgtagtgggttacttggtaattggttggttctaggcgacttaagtcggcgattagatagtcgatttcttcttgagtttcattgaaccgaggatcaacaacgaataccagtaagccaccgcgattaagccgtgagagaatttgatgataggcagagattgtcgtgttaggcaatgtcacgtgttcaaaagaatcaggactgagtgcgcctaagctaaaaatagcggcttgcacttttaactcgggtggtaaggcagtgataatccgctcgtgtccttgattaagcaaagtaacctggttcgcttggtttgcttttgtaagacgatccgcgcaggtttcgatggcttctttttgaatttcgaaaccgtaaacctgaccaaaatcagcaacgcgttctgctaaaaataaggtatcatcgccatgccccacggtggcatcaattacgacatcgccgggccgaattgcctggtctaatagaaaatgtgcaaatttagtgggatgatcaagtatcatgtgttaggactccttcagatgcaataatttaaaatgaataaaacagtaccatgaaccgccgagacacgccgttgctaataaaaagccagctaagacatcactcggataatgaacaagtacgtaaatccgactaaggccgatgcatagtgccaatattaaacaggtgccaatcgctatttttcgccaaacgcgttgacgaattaagtagtaaactaggatgcttaaagttccgaaaaaaagaagtgcccccgaagcatgaccgctagggaagctgtagccgcctgcgtagacaagatggtgaaatgggggccgtggtcgttggacgctcatcttaataaagtggttaagcgttgaaaaaaggaccatgttaatgactaaaaagctagctgctgaccactgtttaaagcccagcaaaccaagcgttacaatggtggtcaaagtcattatactatagggattgccgatcgacgtaatcgcaatgcttacagtatccatcaatggggaggaaagcgaccggatgccagttctgataagggtatcaaaatgtataacccaagtggcatggtgcacaacgctgattaaaatgattagaaaactgattgtgccaagaatgaataaactagccgaaaatcgtttggtcatttttaagaaatcctttcaaaataagctgtaattaaagacaaagaagattattaaatgatacaataattattaggcataagacaactaataaaagtagttgcgtgataggattgttttccccatttattaatattataataaagttcaggtgaagctcaagttaattgtgccacagacaataataatggaaattcggaggcgttagaattgaaagagactagaaaacagcgaattgcagctcaaaaggtaagcttacataagcagaagcgggaaattagaattaagaaagttcgtaatgtgacgacttttgcaggggcaaccgtcttgatgggttcagcaattgcacctagtttttcgaatcgggccaaagcagccactgaagatgtgttaaatagtgcaaacaatgatgaccaagctataacagctaatacagcaagtagtgcaacatcatcaacaactagttcaagcacaacgacaactgaatcccaatcaacacaacaacctgttgtaaaacctcaattgactgaaaatgaagcgacaaaggtggctacgccacaaccggcaccatctcaagcgcaaccaatttctggagtgcaaagtacgagtgccaatatcgcaaccgctggcgttgttatggcagtagctaattcaagcgcacaaaatttcatcaattcaattgctagttcagctcaacaattagcgggtggtaacgatttgtatgcctctgttatgattgcccaagcatcattagaatcaggatttgggagcagtggtttaggttctgcccctaattataacttgtttggggtaaaagggacttacaatggtagttctgtttatatgtggacttgggaagatgatggtcatgggaacatgtatcagatccaagctgcatttagaaaatatccttcatactaccaatcgttacaagattatgtgcatgtgctacggaatacttcatttggtgcaacgccttattatcaaggggcatttaagagccatacaagtagctatcaacaagccacacaatacttacaaggacgttatgcaacagcaaccaattatgcgtcaagtttgaaccgtttgattcaacaatacaatttaacgcaatatgacacgccagggaccaatactggtaacaataatgggggaacaacgactccaaccacgccaacgactccaacgacacctgaaaatgggacaaaatacaccgttagagccggcgattctgtttgggggattgctaatcggtatgggatttcaatgaatgacttgattagctggaataacatcaagaacaatatgattcacccaggccaagtcttgattgtttcaagtagtgcagctggcaacaacaatggtgggacgacaaacccaacagaccctacaacaccaacgaatccaacaacaccagctaatggtgataagtataccgttaaagccggcgactctgtttgggcgattgccaacaaatatgggatttcaatgaacgatttaattagttggaataacatcaagaataatatgattcaccctggcgatgttctaacagtttcaaaaaccgcaactggcaatacaaataacaataattcaaacagcaataacggtaatcagacttcaaacaagacgtatacggttaaatcaggggattctgtctgggcaatttcaaaccgttacggcatctcaatggctgacttggttaaatggaataatatccggaacaactttatctatcctggtcaaaaattagtggttagccaaggtgcaacaactggtaattcaaacaacaataatacaaatagtacaaatccagggcaagcttctgggaagacttatacggttaaggccggcgattctgtctggggaattgctaaccgtaacggtatttcgatggcgcaattaatcaaggctaataatattaagaataactttatctacccaggtcaagtcttaaaattaatggctggcgctacaacgccaacgacgcctaacacgaattctgggaagacttatacggttaaatcaggcgatagtctttggtcaatcgcacaaaaaaataataccagtatcgcacaattaaaatcagcgaacaatttacattctgatttaatcttagtcggccaagtcttgaaattgaagtaagagtttggtatgctaagaacaattatttaacgttgagaaggattagtagttatcgttaagcgtttagagagcgtgtggttagtgtgaacacgtcgtttaacataacgaactcgcctttgagttttctattgaactgatagtagatagaaacgtctgccgcgttaaggccagagagttgtccaatatagattggacagaacttaggtggcatcgcggtcaattcgtcctatggtatttataccataggacttttttattggcgttaagtgaattaaaaaagagtgtgtcaaaagtgtccatgcttttgaaagcacgttaaaaaaaggagtgtttgatatgacttacgatcatcgcgcagttgaacaaaagtggcaagcttactggcaatcacacaaatcgttcaaaacaacagaagataaaaataagaaaaatttctatgcattagatatgttcccatatccgtcaggtcaaggcttacacgttggccatcctgaaggttatacggcaactgatatcttggcccggatgaaacggatgcaaggcttcaacgtgttgcacccaatgggttgggatgcattcggcttacctgctgaacaatatgcgttggatactgggaataatcctgctgatttcacgcaaaccaatattaatacgttcaaacgccaaatcaattcattaggcttctcatacgattgggatcgtgaagtgaatacaacggatcctgatttctacaaatggacccaatggatttttgaaaaaatgtacgaaaagggcttagcttatgaagctgaagtggctgttaactggagccctgatttagggaccgttgtcgcaaacgaagaagtcattgacggcaaaacagaacgcggtggctatcctgtttaccggaaaccaatgcgtcaatggatgttgaagattacggcttatgctgatcgtttaatcgacgacttagacctagttgattggcctgaaagtgtcaaggatatgcaacgcaactggattggccgctcaaaaggcgctgaagtatcatttgctgttgaaaaccacgacgctcagattgatgtcttcaccacgcgtgccgacacaatgtttggtgtcagctatatcgtgatggccccagaacataaattagtggccgatatcacaacgcctgaacaaaaagcagctgttgatgcttatttaaaagaaatcgaacacaagagtgatcttgaacggactgatttggcgaaagataaaacaggggcctttacaggtgcttacgccattaatccagtcaatggcgaacggttaccaatctggatttcagattacgttctagcctcatacgggactggtgctgtgatggctgtccctgcacatgaccctcgtgattgggaatttgcgaagaaatttggtttaccattgaaaccagttgtggctggtggtaatcctgaagaagctgttcacacagaacctggtgtgatgattaattcagatttccttgatggtttagacaaacaagcagcaatcgacaagatgattgattggttagtaacgcataatgctggtcatgaacaagtgagctacaagttgcgtgactggttattctcacgtcaacgctactggggtgaaccgattccaattattcattgggaagatggcacaacatcagtggtgccagaagctcaattaccacttgaattaccattaacaagtgatatcaagccttcagggactggtgaaagtccacttgcgaacttagcggactggttaaacgtaaccgacgaaaatgggcgcaaaggccgtcgtgaaacgaatacaatgccacaatgggctggtagctcatggtattaccttcgttatatcgatcctaagaaccctgataaattggctgactttgataagttgaaagactggttaccagttgatatgtacatcggtggtgcggaacatgctgtgcttcatttattatatgttcgtttctggcacaagttcttgtatgatatcggggtcgtgccaacgaaggaaccattccaacacctatataaccaaggtatgattttaggcgataaccacgaaaaaatgtcgaaatcaaaagggaacgttgttaaccctgatgatgttgtcgatcgctttggcgctgatacattacgtttatacgaaatgttcatgggcccattagatgcttccatttcatggagtgaaaagggcttagccggcgcgcgtaaattcttggaccgggtatggcgtctatacacagaagaagataccgacgaaaacgaccaactttcaagcaagattgtcgctgaaaatgatgaacaattgaagaagagttacaacgaaactgttaagaaagtgacagaagacttcgaaagcatgcactttaacgtggccatttcacaattgatggtcttcatcaatgatgcttataaagttgacacactaccacgtgaatacgctgaaggcttcgtgaagttattagcgccaattgcaccacacatgatggaagaattatgggcaatgcttggccatgatgactcaatcagttacgtggactggccaacatttgacccagcagcattggtcgctaacgaagtagaagtgatcttccaagttaacggtaagttaaaggccaaagtaacagtagctaaagacacaccgaaggaagaattagaagcgatggctaaggcaaatgaaaaagtagctgaattcattgctgacaagacggtgcgcaaagtgattgccattccaaataaattggtcaatatcgtcgccaattagagtgcgtttcaaaaagagtgggttcaagctcggtcaacttttgagcattatcagagggaagcgaataagcgacgtagtcgattgtttgattcactgggataagcgcagaaagttagcttgaaaagcacgtttcagacaagagtgcgtttggttgcggttagcaactgagcattaataaaaaatttcaaataatccaggttttaggattatttgaaattttagattaagcggaagttgttgcaaccaaaaagcatgtttcaaaaaagcagttactgtttctcgcagtaactgctttttcttatttaaaattaatatttaggggcctaattatccttcaattaatataagggttattctaaagcgcttttaagatgataaaaagatgagagcgactattgcttttgggtgttttttattatacgatgataagtaaatttagattctggggttaaccaataatgatgatgctaaaatagaggggtttgaggactatgaaacgaaatttaactgcccgtcagatgcagatgattgcacttggcgggacaattggggttgggctttttatgggggccaacacgacaattaaatggacggggccgtctgtgctgattgcgtatgggattgctggtttattgctgtatctcattatgcgtgcacttggagaaatgctgtatgttgatccagatacggggtcctttgccaagtttgcaacggaatatatgcatccaatttttggttacttaacagcttggagcaatgtcttccaattcgttgtcgtggggatgagtgaaatgattgccatcggcggttacttagaattctggtggccgaacttgccgggctgggtaccgggactggtcgcgattacgttcttatgtgcggccaacttaatttcagtcagcatgtttggtgaattggaattctggtttgcgttgattaaagtcgtcacgattattctgatgatcgtggcaggccttggactcattgtttttgggattggaaaccatatgcatccagtcggcattagtaatttgtggacgcacggcttctttacgggtggctttaaaggcttcatcttcgccttggcaattgtcttggcatcatatcaagggattgaattgattgggattacggctggcgaggctgaaaatccacaatcaacattggttaaagcaattcaatccactgttgcgcggattttgattttctatattggggcgattttcgtaatcttgagcatttatccttggaatgaattgagtcaggtcggttcaccgtttgtgcaaacctttgctaaaattgggattaccgctgcagcatcaatcattaactttgtagtgattacagcagccttatcgggtgctaactcagggatttacagtgccagtcgaatgacgttcacattagccaataatgggcagttaccaaaacgattcttgaaattaaaccgccacggtgtcccattttatgcggtcggggcgatttcattagggattttaatcggggtgattttaaacgccattttaccacttgtttatccaaaagctggcaatgtcttcgtgctcgtttatagttcaagtgtcttaccagggatggtgccatggttcgtcattttgatcagccaaattgcctttagaaaacaacacgctgacaagatggcacaacatccatttaagatgccttggtcaccttattcgaactacattacattggcgatgctagccatcaccttaatcttcatgttcattaatccggaaacgcggatttcaatcattgttggtttaattttcttaatgatcatggtggttatttatttcgtgaaatttggtcggcaaaaataattacaagcaaaaaggcagcctagttggctgtcttttttttattcgattggattgatttgatcgcgatgtaaaacagtgattgattcacccgctgtttggcggcgatcaatgttatcttcgccccataaacagaggagatttaagattttattgagtgactgaccgtattcagagaggctgtattcaacgcgtggcggaatttcttgataaattttacgattgatgatgccatcgttttcgagttcgcgtaattgtgcagtgagcaccttttgggaaatctttgggatgcgttgtaagagctcgcttgatcgccgtggttggttgcgcaaatgacaaagaataacgggtttccatttaccgccgataatttccatcgtagcttcaacgccaattttatatgttttctcattcatttctaattttgattcaccttttcattgtgataagactcaattattacttttcagtaacctactgactaaaaagtgcgtgattgtgaaaatgacgctcctattgaataatatagtacatcagtaaaaaagtctaataggagtgtggcagtatgagtagtaaacaacgggcgaacctcacattactagcattggcaatcagtgcttttgcgattggttcgacagaattcatcagtgtcggcttaatgccattgatgattaaggattttgggattacgatgagtcaagcaggactaaccgtatcgatgtatgctttggaaattacgattggggcaccgattttggcgattttaacaagtcgttggccacggaaaaatttattgttggggattatggttgtctttatcattggtaacttgacggtcgcttttgcgccagtcttcgccgtcgtcttggtgggacggattatttcatcattagcacatgggatttttatgtcaatcgcatccgtggttgccgccgatgttgttgaaccagaacgacgcgctagcgcgattgcggtgatgttcaccggcttgacggtggcgaccgtgactggggtaccactgggaacgttcatcggtcaggtttcaacttggcacatgtcgtttatttttatcgcagcaatcggtgtcttaggccttgttgcgaactggttcttagtgcctaatgatttactattgggacaacccagtcaattcagcgggatcattcgcgtatttaaaaataaagcaattgtggtagccttattaatcacagcgcttggttatggcgggacgtttaaggtttatacctttgtaacgccgattttagaatcaaaaatgggttggtcaccaagggccgttgtgatcatcttaattatttatggtctgatggtggcttttggaaatacgttgggtggcaaatggtcaaatcaccaaccgttgatggcgctattgaaaatgtttgttggcttgttagtaaccttgttgctattcatgttaacgttaaatggccattggttcggtttaattaacgttttattgatgggctttttcgccttcatgaacgttccagggctccaattatacattgtgcagttggctgaaaaaatcacgccaaatgatattccattggcttcggctttgaatatctcagcctttaatatcgggattacgataggctcattagttggcgggcaagcatcggcagcttggggcttagacagtacaccaatctttggcggtatcatggtttttgtcagcattctgttgacgtggtatttgattcaacaaagtaaacaagctaaataatgagatggcagagggctccgcgaaggcggggatcttttttgaaacgtgctattggcgctagatttctgcgcctaactacaaaacgggaatcatggccgagtacgccataattcccgtttttaggttagtgctcaaaatctgggcaagcgctaatagcactcttattgaaacgtgcttctgatgacaacaacttccgcttaatctaaaattcccaataatcttaaaacctggattattgggaattttgtattaatgctcagttgctaaccgtcatcagaagcactctttttcataaagttttgttaaaggaattgcaaggcttggggcaatcctctaaaatggtaggaagatgctttttgacgtttaataagggagttatgggaaatgaccaattcacctgaaacaaaggcgacggatagatcttcacaaagtaagatgttacggggctccgcttggatgaccgctgggagtattttctcgcgaattctgggcgccgtctatgtaattccgtggccaatctggtttggcgcgaatttcttacaagccaacacattatttgcaaaaggataccaaatttatagtgtctttttagtgatctcgacggctgggattccaggggcgctatcgaaacaaattgcacgctataacgaaatgaatgagtatggcattggtcagcgtcttttcagaaagtcgctgattttaatgttggcaatgggtgttttatcagcgctcgcactctttgcgttagcgcccgttctagcagcgggtgatccgcggatggtaccggtcttccggtcattaagctggccgctattgattattccattgctcagtattatgcggggctttttccaaggctatgccgaaatggcgccgtctgcgatttcgcaatttattgaacaagcagcccgcgtgctgtacatgaccgtgaccgcttttatgattatgcaagtgtttaaaggcagctacgtggatgctgtgacgcaggcgacatttgccgcattcattggggctgctgccggcttgttattactgattttctattatttgaaacaacgcggtcgcatttcagagttagtggccaatagtaacaacgaattagaagtgtcaacgactgacttgttaaaagggattgtgcgccaatcaattccattcatcgtaatcgacgcaagtgtcaacttggtctatatcatcgaccaatacacgtttaatccgatgatgcatgatttcgtggttgccagtgatcatcagttgtataacttgtatgctttatttgcagctaatgcgaataaactgatttcaatcaccgtttcactcgctgctgccatggcggtcacggcgattccattgatgtcagctgcgcatgtgcggggcaatcaaaaagaattgcaacatcaaatcggcagtactttgcaattattcaacttagtgatgattccagcggcatttgggatggcggcggttgccggtccgctttacacgttattctacgcgcatgatatgcttgggattagtgtcttacaattttcatcttacatttctattatgctcggcctctttacggttttaggcgctgtcttacaaggcctctatcagaaccgcttggcattgttttacttattcatcggattcatcgtcaaaattgtggcgcagtacccagcgatttattttttccgtgtctatggcccgctagtatcgaccggcttagcctttgcgacaagttcggttttaatgattgcagcactgcatcgctattatcactttgcattacgcaaaaccattcggcgcttaatcggcgttttaggcttctcattggtgatgtatttggtaacggcgggggcagtcaaggggttataccttgtctttaacccgtacagccgtcttcagagcgttctagtcttaatgattagcgttggcctaggtgtggctgtttacgccgcattggtgcttaaatcgcgcttagcggactatgtcattgggagtaacttggatcggtttagaagaaagttgagaatcaaatgagaattgatcgctttttaagtcatatgaatgtggcttcacgcaaagaattaaaggtactttttaaagcgggacgcgtgcgcgttgatgggactgtggtcaaagatgcgaagttcaaagtgaacgaggcgaccgttgtctatgttgacgacgaacccgtgcgttatcaaacctatttttattggctgatgaacaaaccggcgggtgtgatttcggcgacgactgatccccagaaaacagtgcttgatttattggcaccagcggacttgcgggatgatctgtttccagtggggcgattggataaagatacaaccggcttattattgttgacgaatgacggcgatttaagccatgccttgttgagtcctaaaaaacacgtcagcaaggtttatcgcgccacgattgccgggattgtcacggcagaggatcaagcgcggtttgaagcggggctcgtgttgagtgattttactgcacaaccagcacagcttgaaattctgagtgttgatgaggcgcaacaagaaagtcagattaccgttgagattcatgaaggtaaattccatcaagtgaagcggatgtttcatgcggtcggcaaggaagtcttgacgctagaacggcttaagatgggaccactggcattgccagatgatttagaccgtggccaataccgtgcgttgacagatgcagaacttgcattacttaaagcgaattaataaacagcagccctttcaaaaggactgctgtttttttaagattgatgaatcattttagccatatagtgtggtaaggtctgaatcacttggctaggaagtgtgacgtattgggttttggcgagttcatcagcaatcgcactgtgggtataaacagcggcacaaatcgtctgatagtgggtgccaaattgaccacagaatgcggcaataataccagtcagtgtatcgccgctaccgccagttgccatggaaggcccaccgatggttagttgctgaacctgttgctgatgatagacctcagtgtgatgttttttaagcactaaagtcgcgtttggataagcagcgagtgcggcttgattagtagcaaccgtttgctgctcgattgcaatgccgctgaggcgcgcccattccatttgatgcggggttaaaatgagttgcgtattcgggatcgtcagtttttcatgtgcgatgattgatagtgctgaaccatcgataatcagtgtttgtgttggttggatggtttgtaagatttttctcagcagttcaacggcaaacgaagtaatgccaagaccaggtccgacaacaacgacatcagcagcctggactgcagacgaccactgcacgaagggttgttgataatcaatgaacatggcttctggtaagcgcgcgtgcagtccgctgagaacacttaagtcactagcaacggaaactaatccagcaccagcataaacagccgcagaggcactcataatcgcagcaccgccgtattgctgactaccaccaatgattaagacgcggccaaaatcgcctttatgactgatggcaggccgtgcctgcaggaccgcacgaacggttgaatttgtgatgacttgcatctgaatccctcccttatcaactattattataagcgaaatattaataaatgggtattggcagggctctgtaacactggtacaatagtcttgtagcacaatcgcccgtgtggcggaactggcagacgcgcagcgttcaggtcgctgtttgggtaaccaagtacaggttcgaatcctgccacgggcattatggattaaaaaaggatcgctatcactttagatagcggtctttttttgttcaaaaagtacatcgattattgattatttacctcattatgactggtttagccaatggattagcgacaattattagcactattcaaaaaagttgcatcaattttaaggaattaaaccattagtagaaaacgatagctttaaataaatattttcttatcaatataattattatttgaactataaaaacggctgaaagctacaagctgtaaactgcatcgcgattaaaaggtcatttaataaataaaaacatcacaaacttggcgaatttcaataaaaaaatattaatagggttaaaacttattaaaaatatttttttgtcaataccgttaatttcagctatttacatttaattaatttatataatataatgcctgtggagcagagcaggattactagttcgcatattgtaggtcctcaaaatagatagaaggagtaatgcttattatgaataatcaattattaatgctcattaaatatcgtaatattttggatcaattatttgtcacagttttgcaaaatgttgacttatcactcgaacaatatttgttgatggaaaaaatggatcgtgaaaaagaagaaacgcccggcaaccttgctgcttgtatgggcgtttctcgaccagctatttcccgccaatgccaatcgttgggtgaaaaaggattaattgaacgggctaatgtggggagttttattggtgatagtcgtaaagtatactatcgacttacaaccaaggggaaacagttattattaaagattagactaaacagtaatgacatgattgatagtttggattctggatttgttactaccaattgggatgaaattgataaccaaattgcgctaatgtccgacgcggttaaaagaacattcaatatcaatgagattcaaatcttttagagagactatcggaatctgaacgggggagttatttagtttagcgcgtgttaatgggcaggatcgaagcgatggatgtcgagtatgattatttttgaatgtaaccggttgcgatgaattggcataaacggtatattattaaggtatctaagggataggagagaactaagcatgacaattaaattaatcgcatccgatatggatcataccttattaactgagagtggccagttgccaccaaactttataccaaccattcagcaattacatgctaaaggggttcaattcgcagctgccagcggtcgaccaatgtacacgttaaagcaaatgtttcccgaacttgctgacacaatggtttacgtcagcgataacgggggtgcaattggttatcaaggtgaaactttattcaaaagtttattgccgttagctgattaccaacggatggtccaattcgttaatcaaacgccagatgggattggcgtgatttgtgggatggacgcggcgtacgttgaaacacaatatcgagattatgacgcgactttgcggcaattctatgccaacattgaatatgtacctgatttaacgcaggttagtgttgaagccaacaagtttacgatttatttcccgggaaaagatagtcaagcacagtatgaagctgttttcgcacccgaatttgaaccggcttattcagtaacggttgctggtgttgaatggatcgatattatgaatcaaggcatcgacaaaggccatgcaatgcgctttttggcggattatttcaacatcacgccggcgcaaatgatggccttcggggatacttataatgataaagaaatgctgcaaaccgttgaacatagttatttgatggggaatgctgccgacgatatgatccaatatgcgacttatcgtgccgacactaatgagaactatggtgtgttaaaggagattcagaaattactttagtcaaccaatcgtagatgaattggtaatgctgggtagcatctgtttctaataaaatttcatgcgctgtatgaggtagaatgcgcaccgttgcgttgttaacggtgcgctttttgaattggttcgttaaatgccgcgcgcggcgaccataaccgccagctggatcgtcggcgccactcattacgagaactgggcgggattgtaaggcaagttgccaatcagcatgccgagttaactcagtgagggtgaagagcattgcaaaaccgctatttgaaaagacgtagccacacaatggatgctgttcgtaggccgccacgtttgcttgattgtaacttaaccatgaaaaaggtcggtgagcatcaaatcgtttaggatagaccccaaacgccaagttattccagacagtaccggggcgcttagctgcaatggcgccgattaatttaacgattggtaaggcgggtttaagaatgaagggtacatcgataacgcccatgaagatggctccagtaatcggcacttcagtttgcttaacatattgtgtcgctagcattgagcccattgagtgtccgagcacaaataatggtagctctgggtattcctcgtggacaatgcgaccgattaaggtacaatcgttgactagcgtctggagcccgtttggcccgaaataaccgagctcatcgttggactgaacggagtggccttgcccaatatgatcgtgtccgatgacgataatcccacgatctgctaagaattgagcgaaagcatcataacgttcgatatattcggccatcccagttagaatttggacaactgcgaccggtttttggattggaaaccaagtcacgacatttaaagtatggattcgatcagtagattgaacggtcaatttttgcattggttagcgcctcccgaaaaagataacgtactttacgattcattttagcagaaacaatctagagataccaaaaggacgccaaacaactttaaccgttgtttggcgtcctttttagtcatgcttaaagttgcacatcatcgttaattcgtgttgcgcgtgagaagtatttcgaatagaagcgactgataattccccaatagtaaaagatgagggctaatgcgctaattaagacgaaatcgagtgggtaaggaatcaggttaattccgttgaattcccgactgcccaagaatgaaatcagcgaaagcaatgcgagatagataattaaccataagcttcctttgaattgggcccaagtattttcccagtgaatccgatactcatagtagaaataaaatggtaagccaagcataatgacgccaatcaccttaatggttgttggccacattgcccagtaagttgccaaactggcaaggacaaaggataatggcgacatgattttcatccaaggtgaatgaacagggcggttcatatcaggggccattttacgtaatgacatgacggtgaccgggccggttaaataggcaatcaacgttgcggttgaaatcacgctggctaacgttccccaacttctaaaaattgaaacgagtagcatgctgacgatggcgttaatggccatcgcaatgcgaggaatattatattgttcgttcatgcggccgacaatcggtggcatgtgtttgttctgctttaatgctgctaatgtccgtgcacatgaagcgacaaaggaaacgccggtcccaaagggtgaaacaaacgcatctaagtaaagtaagacggctaaccaatggattccaagtaaaatggctaagtcggcaaagggtgattggaagtttaaaccgtgccaaccgactttggcgagcaaggcgggtgaaacagaaccgataaaggtaatttgcaagagtagataaatcacaatactgatcccaagtgaaattgcaattccacgtccaatattccgtttagaatcacggatttcactgccgacattgattactgtttgaaaggcattgtatgaaaagataatcccagaaatcgaagtggctgcaaaaattttggcggaaccatagggcataaacgtcgccattgaatgcccgaagttgccagtatggaaaccagttgagactaacataataatggttaataatggcacacctaatttaaagattgcaatgaagctggtaaaacgggtcaagaatttaacggaccagaaatttaaaagggtgaagacgatgataaaggcaaagacgacgagcaagccacgattcgaaatttcagcgtggtgcataaagtgattcgtccagttagcccacgcccatggccaagaactcatatactggacagcagcgacggcttcgattgggataatcgtgactaatgatacccaattggcccacgctgcgatgaagccgagtaatgaaccgtgactatattgggcatagtgactcatcccgccactttcaggaaacatcgtcccgagttcaacgtaattaaaggcaattgcaccaatcacaattgcgccaacaatccaagagatgatggctgctgggcctgccacggtcgttgcctcccatgcaccaaacagccaaccggaaccgatgatggaacttaaacctagcatcactaggctaaataaactcattttgttcttctctatcataaagacctcctgtgtatggtgtgccattatagcaaccatcaccgttggtttcaaattaaaaatgcggctaaaatgagtcgtgaagtctatcaaattaacaatggtaacgccttctgaattaattattaacaattaaaaaaaccgtcacaaaaagtgacggttgaatagttaatttaagtcaattgccccgttgaatggcatccgtttgtttaaaaagatttaatttacgatcgttccagaatgtttcagacatatcgcgatagaagatcgcagtctgacagcctgggcaacgtttgataccatattcaattggcgcctgacatgcagggcaatgaaatgcggttgattcaggaattgtattttgcgaatcggccattaaaaggactccaatcaagttgttatcaatagtataccgcatacatacgctatttgttaagcgtttaaacctttttttttcaaaaaatatgcacaaatcggaaataatatgctatactatatcaagtaatgcgagtgtagtttagtggtaaaactcaagcttcccaagcttgcgtcgcgggtccgattcccgtcactcgcttaaagattcatgcaaaagaggttgcaacagaagaaattttgttgcaacctctttttttattctctgaaatttaatcctcggcggatacccgacttacatcacactcttttcgttatcagacctaaggccgattgtttgtttaaaggcgctctgataaagtatatttattatctatcgactaaaaaatcgtgacacttacgagcaatctaagtagtgggagcgtacgacattgacattattagagattaaagatattcacaagtcctattatatgaacaaggctgaatttaaagtcttaaaaggcatcaatttaagctttgaccgtggcgaatttgtttcaatcctcggggaatcaggcggcggtaaatcgacgttgctgaacatcatcggtgggttagatcaccactacgatggggagctcatcgttgatgggacatctttaaagaatgcatccgaaaagaaatttgatgcttatcggagtcaaacgattggctttattttccagagctttaatttaattagtcatttgactaacttggaaaatgtgatggtgtcacttgaaatgactgatctatcacataaggaacgggttgccaaagcgaccgccttattggaacaagttggcttgaaggaacatatccataaacatcccaaccaattgtcaggtggacaaaagcaacgggttgctattgccagagccttggctgctgatccagatgtcatcattgccgatgaaccaacgggtgcgttagatagccagaatacggccgagattctcgaaatcttacaaaagattgccgaagatggcaaactcgtcatcgccgtaacccattcacaagccgttgctgaccacggaacacgggttgtccacatggttgatgggcagattgattatgacaagcaattaaaaccagcttacccagctccaactggtccggtaattaagaagagtagtccattaagttttatgtctgctttcaaaatggcaatgcaacacatgcgctacgatattaaacggaatttgctcattatttttggcgcgtccattgggattttctccgtcattttaatgctaggcttgggtcaaggggtgactggctatattaatgatcagatttcatcgcaagttaatccaaatacgattcagattgcaagaaacctcacgcgcaaacagattgaagccggtgaacaaggtaacttagctgataaggatatcaaccgccttaataaggtcaaaaacgtgacgaaggttgaaaagggctactatatgaatggtgtccaagtgcactatcaaaagaagagtgaaacagtccaaatgttccaaacgtttaataaaaccgaacgtgtccaagatattaagaccgggactaaacctggggccaacgaaattattttaacgaaggcaatggctaagaagttagataaaaattacaagaagatggttggtcggacagtaaccatttacgtcaatgccattagtaaggatcaacgtccagttcaaatgcgccaagatgtgaaagtttcagggatcatcaattctgggactgaagccgtcacatatggcacattagccaagatgtaccaagcgcaaggattagagtttgcacccaactttgcagcagtcacggttaataagacccaaaatgttaaagccgttcaaaataaaatcaaaacctacactagcaaagtcaacggtaagacacaaaaggattaccaaatcacaggggttggtgcgatcctcgattcaattaacacttacttgatgttagccttctacgtcttagctgggattgccgggatttcattattggtttcagcaatcatgatcatcgtggtgctctacatcagtgtgtcagaacggacgaaggaaatcgggattctacgcgcaatcggcgcccgaaagaaagatattcggcacttattcgtctcagaagccttcttgattgggttattatcaagtgttcttggtgccggcattgctggccttggacaattgcttgtcaatacgttggcccaaccattaacgcatatgccaattgtggcaattaccagtggctacgtcctattcgggataatcatcagcattatcatcagtctcttagcggcactagcaccttctcgtaaggcagctaagttagatccaattgaagccctcgcggcagaataattgcgcttgaaaagtgcagctaagttctatatactaattatcaagttcgaacagtcaaaagaatagcatcaacagcgatttatagcgagctcacagacggtgtaaggtgggtaatcaagttgacgcggcgcgcttttggttgaacaattgcatactattgagtggatcgattgatcaatcagagtggtaccgcgggaattctcgtctctttcatttatttggaagggactttttttgttcacaaatattaggaggctatcaacatggattttaaacaacaagtcaccactgccttaatgggcgttttaggggacagtttaccagcagataaagtagcacaactcattgaaacaccaaaaacatcagacttaggggactatgcttttccaacgtttatcttagcgaaaacattacggaaagcaccccaacaaatcgcccaagacttagtcgcagaaatggatcaagccggctttgaaaaagtgattgccaacgggccatacatcaacttcttcttggataaggctacgtttagcgaccaaatcctcaaaaccgtcttaacgcaagccgctaattacggccaaagtgacctcggtaaagggggcaacgtgccaatcgacatgtcatcacccaacatcgctaaacccatctcaatgggccatttacggtcaacagtgattgggaactcaatcgccaaaattttgacaaaagtgggcttcaacccaattaaaatcaatcacttgggtgactggggtactcaattcggtaaattaatcgtagcttataaaaaatgggggagtgaagaagaagttaaagaagacccaatcacgaaccttttgaaatattacgttaagttccatcaagaagacgttgaacatccagaattagacgatgaagcacgggcatggttccgtaagcttgaagccggggatgaagaagcaacgaagttatggtcatggtttagaactgaatcattaaaggaattccaaaagatctatacgatgttaggggtcgaattcgactcatttaatggtgaagccttctataacgacaagatggacggtgtggtcaacgcacttgaagcaaaagggctcttacaagaaagtcgcggtgctgaaatcgtcgacttaacagcttacaacttgaacccagccttgattaaaaaatcagacggcgcaacactctacatgacacgtgatttagccgctgcgatgtatcggcatgacacatacgacttcgtgcaatcattgtacgttgttggtggcgaacaacgggaacatttcaaccaaatgaaggccgttttaaaagaaatgggcaacgattggtcggacgaaattcaccatattccattcggcttaattactcaaggtggtaagaaattatcaacgcgtagcggtcgtgtgatcttattggaagaagttttaaatgacgccgttaacctagcacaacaacaaattgaagccaaaaaccctgatttaccaaacaaagaagaagttgcaaaacaagtcggcatcggtgcggttattttccatgatttgaagaatgatcgtttagataattttgactttgacttagaagaagttgtgcgtttcgaaggtgagacaggtccatacgtgcaatacacaaatgcccgtgcccaaagtatcttgcgcaaggccaaccaagaagtcgcaatggacgctgacttagtcgtttcagatgccaacgcttgggatgtcttgaagatgctcggcaacttcccagatgtgattgtcaaagccagccaagaatacgaaccatcagtgattgccaaatacgcattacgcttggcaaaagccttcaacaagtattacgcaaactcaaaaattttggcagacgacgatcaaaaaaatgcgcgtctttcattagtgaagagtgtcagcacagtcctagaagcctcactagacttattaggcgtacaagcaccaaaagcaatgtagagtgcgtttaaagcggtttgactctgagcatttgcctaatatcgtgaataagcgacgcagtcgattgtttgcgatatgtagcaaagcacaagagtcagctttaaaaagcatgtttaaaaacagagtgcctttgaaacggtttgaccttgaggattaacaaaaaaatagcgattatggcgggttttagccataaccgctatttttaggttaaccggaaaggtcagtttcaaaaagcacatttaagccacccgattaaatcaatctggtggcttttttatttttcgaaaaattctaattcgatgacaaccccgccaacttccgttatagtaatcttgaaatagtgggggagggttcactaatggtattagtcttaaaacgccagattaaagggattccggttttggaagtggtcgctgacgaacaacgtcatcagccattaccactcgtgatttactatcatggctggcggtcagcaaaagaattggttttaacgcaagcgcgtaaactggctgaagctgggatgcgcgtggtattaccggatgcactgaatcatggtgaacggctgcaacctgtttcagagattccgtcatggactttttggcaaagtattcaaaccaaccttgccgaattcagtttgattgttgattactggcaccaacttaatttaattcaagctgaccgcatcggcgtcgggggtgtttccatgggtgggatgacaacggcggcactcttaaccaagcatccagaaattaaagtggcggcttgtatcatgggctcgccggcaccgctagcctatgcgcgcttagttcgtgaaaatatccgtgcgcatcagttagcacaacctgacgatctagggttattgacaagttggttaacggcctacgatttaactgaacagccgcaggcaattgctcaacggcctgttttattctggcatgggacagcagatgaacgaattccctatgaacaagtagcagcttttgaacagcagattaaaggtcaaacttatgccaaaaacgtgacatttttaacagcaaatggtgaacgccatctggtgaagccagcgctgatgaacataattacagatttttttagtacgcaactataaaataaatcatttttaaaaagccaacgttaaattcttagcgttggcctttttgacgtgttttatttcttggaatattaaaaaaataatgatttataatggggattaaaatacgaatttagacgactttttcattggtttggtatagcgggaagaatgctttttattatttgtataatacgtgttgtatgcttatcggtctaattgtttatcgcagtaatatggattttatgtgtcgataatatttatggaaacaattatctgtttattatagacggagttgatgaagcgtgttaagttaaatgtgttccaaaaataattttttaggagatgagactatcaaaaaagtagtaggtattttagcgttcggcattttaacgaccagttgcatgagtattttacaagaagcaagggctacgaccagttctaattaccaaagtaagcaaagtgaggtgcttgatgatagcctccaacctaaggtgaggcaccagaagggtgtaacacgttcagaaaaggcgccatattcaaaactgtatattggccgcggtgatgttaataaagaattggctcggcaacaaagggccttgagttattcaagcttagagccttccggattatacgccaaaaaaggggacgtgctgacggtgagcaaaacgggtcaagacttgatgtctctgacgattggctcgcctgagcgagatgttcagaaacgatatccgctcgtaaatggggtgacgactattacagttgaaaatgatggccctatttatgtgacgaatccaaatgattcaggcggtactagggtgtcaatctttgatgccactggtgaaatgccgttctttgatgcaaacaagacgagtgtcgaagattttaagaaacaaatgactgaaatgacagacgcaaaagatgttcaacttgttagtgatcgtgctttaattactgtgagttatgagatggcaaagaaatatttgggggatcccaaagcgttaatggctaattatgaccgattcctggtcgctcaagatcgagtttcagggatcagtaatgaaggtcggccggttaacttttcagatcgccatttacaacatttcttagaatcgccatcgtattatatgtatgcgacaaacgaatacatgggttttaaagacgatgcagctatgaaaagtttattagaacttcaggatccttgggaaatctggcatgaaagtggtcatcagagacaacaaaaaccatggacatggagagaagttgtcgaatcgagtgttaatatttattcgttagcagcgcaaaaagaaatgacgggtgcgatgcctgatttagataagtattatccagaaatgtacgcctatctaaattctgatcataaaaacttcaatcaacaaggggactttgtcaaaatgacaatgtttgcccaactagcaaacacctttggcgatgatttctacccgatcttacatcagtattatcgcgaaaatcagttagcctatgattcaaatgaagatcgaatgcagcattttttgttacatgtctctgaagtaacgggctataatatgctcccttattatgaacaatggggatttaaagtttctgaagaagtacagaagaaaatcagcaactacacaacgttggctgacccaatttggttaaatgacaatcaaactaaaaaacaattgccaatgagcttaatgaaggctgtgtcgctcagtaaacaagggattaaagttgacttaacaaactatcaaattaatatctttaaggatcagaaattaattgttaagaaaaatggcaaggtgatcgcggagttggctgataagaaaccagctaatgggatagttattaatgatatttggcagattgatgaaccacttgatgtaaccgatatgattatcattgaacaacaaaatgccaatgggacttataatcggtttaatcaatcgatcagtgggacttcgcttagggaacaattggaaaactatttaaacacaacaaaaccaatcgagacgattctaacgcaagataaattaaacaatctacgccgacaggttgatgcactacaacctaatactgataaagaagaattaatggagatggttaaaaagctccaacaaagatatttagacgtattagttggtgaaattgaactgaattcagaatcagaacttgtggtgacatttgctgatggaaaacttaaggaatatgacgatttaaaagttcaagcagatacacatacgattgctcaagtaacgaatggtaagccgaatgttggtcgtgttgaaggaaatcaattgattattccaaaccaaaaagatgccactgcgatctcgatagcggtgactttaccgcatggcacttatctagtgaaagtgattagccaatcggtgcttgttgctagaaagttagtatcggatttatttgaacaggacggtaagttgaaaccaaatgtgacgcaagaagtgttagatcgagcatggcagcaagtaaatcagttaccacaagacagcaaagaagcgctagcgaaaaaaatgaaggaggcacaacagttattcttgaatgcgcttattgcggatgtaacgcttaaagatgccaaaatgatggtgacttttgcaaatgacctatttaaaaaatatacgattcttgtcatggaagaagaccacagcatagggacaatagtgtttggccaggcctttgagggagaattaagcggcaatgtctttacaccaatgcgtttaacagtttcgggtaaaacgtatcgggtaaacgttatgcacaatagcggtacctatcaagttaaaacgttggtagctgattgatgggttatagcgaaaccagataaactaatctaaaggcttttttatgaaattaaattgaaatacaaaattgatatctatcaatgaaaggctgagcaatagtgctcgcctttttatttggtttcaacatttgataatccccatttccgtggtagtctgtatataaagcattatcagatggaggttaggcaaacgtggaaaatggacgacttagacgtgctagtcagtttaataagacacggtttcgctttgtgggcaaagggttattagttggggcgttcactggattggtggtcagtttatttcgcttagcgattgaaaaaggactggcctttgttatcactatctatcaagggttaaatgcacacccgtggtattgggtgccattggttggtgccaatttattgatcggcctgcttgtggcacaattattaaaaaaggaaccgaatataagtggttcggggattccacaagttgaaggacaattggaaggtgagtttgatttcaattggtggtcaatcctgtggcgtaaatttgttgggggcattttaagtattgcacctggcttattcttgggacgagaaggcccatcgattcagctgggggctgccgttggacagggggtcgccgctaagttggtaaatcgcggtgctgatcgtcggattttaatcgctagtggggctgccgcgggcttatcggctgcgtttaatgcaccaattgccgggacctttttcgtactagaagaaatctaccataacttttcaccgttagtttgggtgacgtcgcttgctagcgcaattgcagcgaacttcatttcattaaatttttttggtttgacaccgacattacatattacgtactcccaaagtttgccaattaatcagtattggcatttgttgatacttggtgtcgtattaggactgttgggatacgtttatcagaaggtattattgtagttaccacaactttatgcgaagctcccgctgccaaaagcgtataccggattagtgccattattatgtgttttgccgattggttatttctggcccgaaattttgggtggtggcaatggattgattgcacaccttggacaaaatttaccgacaatcagtgtggtggccggtctattcctattacggtttgttttttcaatgatttcatacggttcaggattacctggtgggatttttctaccgattttatcacaaggagctttaatcggtgccctttatggactcataatggttcaacttggttggttagcaccagtttatgttcccaacttaattatttttgcgatgggtggttactttgccggaatcgggaaggcgccatttacggccattctactagtgaccgagatggtaggttcgctcgtgcacttgatgccattagcaattttatcgttggtggcctacatcgtcgttgacttaatggggggcgcgccaatttacgcatcattattgcaacgcgcacttggcaaaccacatcgtaagttagcaacattctctgatcgcttggaggtaccagtgtttgcgggcgcaccgttagaggatcgccaagtccgtgaagtggactggccaaagacatgtttgttaatcgcgattgttcgtggcgaatccgaactgattccgcatggtgatacgttgatccgtgctggtgacacgttgattgtgttaacggatcatcagctacgggcgacggtgcggcggcaaattgaagacgctgcccaagccttgcgaaatacggatgagaatctcgtgaaataatcgataaaaaagtggtgattaactactttttatgctaaagtattaaaagacagtgtagatagaaaggtagggaattaggttggaaaatcttatcctgaacttattattaatcgattcaatcttgattgtgatcgcagtcatgatgcaaccaagtaaacaacaggatgctttgagtgcgttatcaggtggttctggtgatttatttggcaagcaaaaggcccgtggtttcgaagctttcatgcagaaagtaaccgttgttttaggggctttattcttcgtctttgcattagctttagtgtacttatcatcacactaatacatgtgagacgggtcgaattctaataagaacgttgatgcggtctcctgttgaatggcaggagacctttttaaatgaattcaagcagtaaggactttgggggtgagcgcgtgtcttatcggttgccgcaaccgttttattttgacggtggttcagtcggggttgtgttgttacatgcttatacaggtagtgctaatgatgtccgtatgatgggccgctttttggagaaaaatcagctggcggttagtgcaccacagtttgcagggcatgcaacggctgatccaaccgagattttaacgcgcggttctgtcgatgcatggtgggccgatacggtggctgcgattgagcagttatccgcggctaacaaacaaccgttatttgttttcggattgtcattaggcgggttgtttgccatgcgggcattagaagaactaccacaagtttgtggtggtgggatttttagtgcgccagtactcgaaggaccgactgctaaattgacgccgctctttggccaatatgctaatcgaatcatgcagttaatgggcgtcccagctgcgcaacagacagcacgtttggcgactattaatcagcaattaccacaacaacttgcatcaattgatattttcagtcgacaagttgtggctgacttgaagcaaatcggagataaaccggtcttcatcggccaaggcggacaagatcaagttattgatccaacgcaagcccaagtcttacaccagcaattaacgcaacaaaacataacagttgattatcattggtatccacaagccggccacgtcattacggtcgatagtgcgcatcaccaattagaaacagatgtcctagaatttataaaccgttttaagaaatgagaaagaggtgttgatgtgacacaagttgaacagatgaaagcagcgattcttgcaatttttgaagcagatgcaacgcaacaattaaacgtatccgaaattagtgaacgaatcggcgttgccggttcacaagggttcaaagacctagtgaaagtattagcagaattagaaggggataagacattgaatatggacgatgccggtaagttcagattaccagccagcaaccgccttgttgaaggggtcttccatgctaacgatcgtggctttggcttcgtttcaatcgttgataaggaacctaatgatccagatatctttatcgccccacccaatacgaattttgcgatgaatggtgacacggttgaagtggccatcattaaagaagccgaagaaaacagccgtcgcggtcctgaaggaaaagtggcgaaagtgattacgcgggggattgaagaaatcgtcggcgaattcatgccttattcagatatccaaaaagaaaaaacaggctggattggatacatccaaagtcatgccaaaaaattaagtaattaccgaatttatttaacggataatgggttacatccacaaaagggtgacatggtccaagttgacgttaccggttacccaagtgttgaggcgccaggtcaaatgctggggattgccaaacaagtacttggtaacaagaatgatcccggcgttgacgttttatcaatcgtgtatcaacatgatattaagacggacttcccagaagaagttcggcttcaatcagaagcgattccagatacggttttagaatctgataaactaggtcgtaaagatttaacggatcaagacgttgtgacaattgacggcgacgattctaaagattttgatgatgcagttaacgttaaaaagttggcaaacggcaactactacttaggggtccacattgctgacgtgagttactacgtcactgaaggttcaccattagacgttgaagccttagaacgtgggactagtacttatttaactgatcgcgtgattccaatgttgccattccgcttatcaaacgggatttgctcattaaatccagacgttgaacgccttgctttaacgtgtgaaatggaaatcaatgaacacggcgtggtagtggatcacaagattttcccaagtgtgattaagtcaacagcgcggatgacatacaaaaacgtcaataagatcttaacagatcaagatgctgacttacgggcgcaatacgaacggctcgtgccaatgtttgaaacgatgtcagaattacatgaaattctcttgaagaagcgtcataaccgtggtgcaattgatttcgaagaagacgaagctaagattatcgttgatgaaaatggcaaggccatcgacatcgaattacgccaacgcggtctttcagaacgcatgattgaatcatttatgttggctgctaatgaaacggttgcagaacattacagtactgctaatgcacctttcttataccggattcatgaaacaccagatgctgataagatgaagaatttctttgaatttatcacggcttatgggattcaagcacacggttcaagtaagaaagtgacgccaatgatgctccaagaagtcttgacgcaaattgaaggtcaacctgaacaaccgattattacaacgatgttattaagaagtatgcaacaagcacattattctgatgaatcccttggtcactttggtttgggtgcggaattctacacgcatttcacgtctccaatccgtcgttaccctgatttgatggttcatcgtttgattcatagttatgccacaaatgggatgacgattgaagaaaaagaaaaatgggcacctaagttacaaccaatcgcagaacaaacatcccttgaagaacgtcgctcaatcgatactgaacgggaagtcgttgatcttaagaaggctgaatacatgcttgataaggtcggtaatgaatacgacgctgtgattagttctgttaccagctttgggatgtttatcgcattaccaagcacggttgaaggcctcgtccacatctcacagatgaaagatgactactatagctttgttgaaagccaattagcccttgtcggtgaaagaacgcataagatgttccgcattggccaaccagtacgggtcaaggtcgcgaatgttgatttagatgcccactcagtggactttgaattattagccggtgaagaagtgccattggcttcggctgaaatcttaagcaagattgaagcacgaccaaaacgtccagcacgcccacgtgatcatgaaaaaggcggtcaacgtcgtggtgatcaaaagaaaaacaatcatccaagacgcccagctgcgaacaaggactcacaaaaacgtacttttaaaaagtaggtgattgaatggcaaagaaacatcctcaaaaaccagcaaatttaattgcacagaataaaaaagctggtcacgattataatattttggaaacattcgaagcaggcttagtgctcactggtaccgagattaaatcggtccgtaagggcaaaatcaacttacgtgatgggttcgcccgcgtccgtaaaggagaagcctatctcgaaaatgtccatatcagcccttatgaacaaggcaatcagtttaatcatgacccattgcgcaaccggaagctattgttgcacaagaaggaaattaccaagattggtgctttaacgaagaataaggggattacgattgtgccgttacgggtttatttgaaacacggctttgccaaagttttaatcggcgttggtgaagggaaacgggaatacgataagcgcgaaacactgaaacgaaaagaacaagatcgtgaaatggcccgcgcagttcggattaaaggttagtcctttaattaaaatctaagtataaagtcaaaaagctatcacaaaatttacttttgtggtagctttttctattggaagtatttggtttgtcggcggttacaagtgggtttttattacacaaaaattataaatgtcttcaaactgtaatataacgtcattaatctgcaatcttcttgcggggattgttgcgtataatcaagtctgagttatgaatggaggagtttaacaagatgcgatttagaaaactagcgttagctgttgttacctgtttagttgcaatggttacgatgggcacatctgttagtgctgccagtttgagcgaattacaagcccaagaaagcagtacccaaaaaagtattgatgatacaaattcgaagattcaagccactttaacgagcgtgaatgcgaagtatcaagaaattaatgccttaaaggaaaagattaaggataacgaaaaaaatatcgaacaagcacaaacgcttttgaaaaagcaacaagccactttagcaaaacgtaaaagctatgctaaggaacgcttgcaatcacttcaacgaacagccgatgaccgcaacgttgtcaacgcactattgtcagctgattctttgagtgatttcttcaaccgggcttacacattgacggttcttcaaagtgctgacaaccataatatggatgaattagcacagagttaccgtgatacacaagccattcaagataagttacaagctagcaagacagaacttgatgaacaacgaagcagtttggatcaacaatctgtcgaactggaacaacaagtggctggcttaaagaataatttaagtcaaagccaagcggatcttgcaaaaattgctaaagaaaaagcagaagaacaagcacgtgaagaagctgaagccaaagcggctgaagcagctaaaaaagcggccgacgaagcaacacaagcgccaattgcaccagttgtggacacaaatgcccagcaagccgatttagcaagcgctgctgatggcaaggccggacaagcgattcaagtgcaagcaacggcttattcaactgccgaacctggtttgagccattttggtgcaactggaattgatttaactaaaaacccaaattgtatcgccgttgatcctagtgtcattccattaggctcacttgttttggtacctggttacgggtatgcaattgctggtgacatgggtagcgcgattaaaggtcacattattgatgttcattttccaactgttgcggcatgtaagagttggggtcgtcgtcatattacaatcacaattattaagtaattttaaatacagccttttttgaggctgtattttttacttcgtggattgttttggtaaaataaataataaattatatttaataaaggttgtcagggcaactcataatgaacgttgttgatgattattagtgaaagttagttgaaatatataatttaatactatagactatttatattgctttaaatcgaagtacggttaagattagctgactaagtattatttagatcggctatcttagaacacggaagaattgaagtactgaatagtgtgagtatgaaacttatcgatggttaactattgatactgaaagtttcagcatgtaggaggaatagaaatggatacgagtaataacaccgatttactcggtagcacatcagcagattttatggaattcgcaggtttataccggtggttgattaacaaccttagcgaatcaatgagtcgtgaaagccaaaaatacggtttatctttcgaccaatttttagtgatgcacgagattcaaaatgcgaataatgaaacaactaacagtgcattggcagataagatgcaagtgagtcgttcagcgatttcacgtcaatgtcgttcattacgtaagatggcttttatcgcagaacaatctgatgaaaatgaccaacgcattcgtcgtgttcatttgacggaaaagggtttggaagtttatcgtcatctcttgttctattacgtagacttgtacaaagatttacaaaatgaaatcggccaagatactgttggcgcaacaatcgaccaaagcaaaaaaatctttggtcgcatggcatcaatgaacatggatcgcccagaagcaaaataaacgttaaaaaaggccacaaccatttgttgcggcctttttttgtgcgacggatttacaattcaagtgcaacaaattagtcaaatagaaaagactcatagcctgagtccttgtaaaatggaatcaccacaagaccaactacaaggagaactcgactatgagtccgtacacccatcttaccttaaaagaccgtgaatcgatactgcttggtatctctacaggcaaaactcttgataccatcgccaaagagataggtcgttccaagagtacagtcagccgtgaaattgcacgtaacggcggctggcggagctattcggcagccaccgctcaggaccgctaccggcgggttcgcttggctagcaggcgtcctcggatcctcgatcgaccggggactcgtgacgctgtcattcgatatatcacggtgctacattggtcgcctgagcagattgccggtcgcttgtcactagaaggcagtcctattcgcatcagctattcgactatctacagaggtatctacctagataatctcggcgttccattgaagagccatggtgctcgcgggctaccaaggctgcttcgacaccgaggcaagacgcgcaaaatcaaaggcaccataaatgaacgccgggggcgcttcaatgacgtgccatcaattcacgaccgaccccggtcggcagaaaatcgcagctggtttggtcactgggaaggcgatacagtacgcggtaaaacaggacactctgcattagtaacattagttgaccgtaaatcacgctatctgctttcgaagcgaacggccaacgcaaaagctgacactgttagagacgtcatgattgagctgcttggtgccttaccagctaaccgagtaagaacagtgactcctgaccgtggaagggagtttgcccggtacagggagctggcagaacgtctgaatacaaaggtcttctttcctgacccacacgcgcctcaacaacgaggaactaacgaaaacaccaacggactgattagagaatactttcccaagaacacagacctagaccttcagagcgaccaggaaattgagacttacattgaacaactgaataatcgaccacgcaaggtcttaggctggaagacgccatcagaagtcttcatgggtaaaaagttgcacttaagttgacaattcgtcgcgattagcaacggtcgcgcataatgacgcgcgtcactttctttgttagaatagagctagtcactttacgaatgtaggaggaacaacatgggttctcaaaaaaaattattattagtcgacggcaatagtgttgcatttcgtgctttttttgcaatgcaccaagctttagaccatttcaccaatcaggcaggactgcacactaatgcgatttatgctttcaagaatatgttggatattattctgaaaaagattgaaccaacacacgtgttagttgcttttgatgcgggcaaaaccacttttagaaccgaacaatttgccgactacaaagggggccgttcaaaaacgccacctgaattaacggaacaatttccttatattagagaactcttaacagcatatggtattcagtcttatgaactcgctaatttcgaagcggacgatatcattggtacacttgctaaacaagcagaagctgatggtttcacggtcgatatcgtcactggtgatcgcgatttaactcaattgacgactagtcagacaaccgttaacatcactgttaaaggggtcaatgaaattgaagcgtatacccctgaacacgttcaagaaaaactcggtttagaaccaagccaaattatcgatttaaaaggattgatgggcgatacctctgataattatcccggggtgacaaaggtcggggaaaagactgcgcttaaattgattacggaatttggaaacattgaaggtgtctatgaacatgtcgatgaaatgaaaaagagtaaattgaaagaacatttgattgaagatcgcgacctagctttcacgagtaagacactggcaaccattaaacgtgacgcgccaattacgattggcttagacgatgtggtgtacaacggacctgatatggcagctttggttgctttttaccaagaaatgaacttcaagtcgtttctaaatcaattagatgttgcaccagttgaacccacggctactgaagactatcaatttacagtattaacccttgataacatcgccgatgtcgtgacaaccactgaaaacgttgcgtttggcatcgaaatgttaaccgacaattaccatacagcagacttgattggcttttacattggccgaccagaccactggtatgtcagcgacgacgcaacactcttgacagaatcggttttaaaaacgtggttagaagatgctaaacgtccgaaagcagtttttgacgtgaaacgcaatcaggttgcggtgaatcgcttagggattcacttagcgggggttcaatttgacttactattagcgtcttatttgttgaatacaacgaataacagtaatgatcttggaacggttgcaaatttacatcagtatcaaaatgtccaaacagatgaagctgtttatggcaagggggctaaacgcgcagcccctgtcgatccaaccgtgctttatcaacatctgattcaaaaagcagcagctatttacaaattagcaccacaattgacagaacaattaaaaaaacatcaacaattcgatttattcacggatatggaattgccattagcgctagttttagcggatatggaaatcaccgggattcgagttgatgcaagtcgcctacaacaaatggggggcgagttcagtcaaacgctgaagattttggaagaaaagatttatgcggaagctggcgaaacgtttaacatcaattcgcctaagcaactgggcgtcattctattcgaaaagatggggttaccagtgattaagaagaccaagaccggctattcaacggcggtggatgtcttggaacaacttaaaaaagacgcaccaattgtccaaaccatcttggattatcgccaaatcgctaagattcagtcaacgtatgtcgaaggattattgaagtcaattcatcaagataataaggtgcatacgcgttacttgcaaaccttaacgcagactggtcgcttgtcatcggttgatcccaacttacaaaatattccagtccgtctagcggaaggccgtaagattcgccaagcgtttgttccaagtcaaccgggttggcagatgtttgcttctgattactcccaaattgaattacgagttttagcccacatttcgggggatgccaatatgcaagaggcattcaaggaagaccgcgatatccatgcgaatactgcgatgaagatttttggcttatcgagcgctgatgaagtgacaccagatatgcggcgccaagcgaaagcaactaatttcgggattgtttacgggattagtgactatggcttatcacaaaatattgggatcacaagggctgaagctaaacgctttattgaagcgtattttgaacagtatccaggtgttcatcaattcatgcaagatatcgtgaagaaggcgcgcgaagaaggctacgttgaaacgctcttccatcggcgtcgctatttaccagatattcacgctaaaaacttcaatttgcgctcatttgcagaacgcacggcaatgaataccccaattcaagggagtgccgctgatattattaagatggcaatgatcttgatgcaagcggaactgaagaaggcaggattacaagccaagatgcttttacaagtacatgatgaattgatttttgaagcaccagaatcagaaataccaatgttagaaaaattagtaccaaatgtcatggattctgcggtttcattagcggtgcctctgaaagttgaaagtggctttggaccaacttggtacgatattaagaaataaggggacacacaatgccagaattaccagaagttgaaaatgtgcgccgcggattggaacaattagtggtcggtaagacggttcaagcaattgagattcgctggtcgaaaattatcagtaatccagacgatgtttttgttgaaggtcttgttggacgccaaattatcggtgttgatcgacgcggtaagtatttattgattcgtttcgatcaaaacttaactgttgtgagtcatttgcggatggaaggcaaatacgaagttgatgatcaatccgtaccaatgactaagcacacgcatgtgatttggacatttacagatggacaacagttacgttatcttgattcacgtaagtttggccgaatgttattaattgaaacgggtcaagaaaacactgtttctggattgaaggacttaggggttgaaccaaccccaacaacgtttaagaaaaccgccttctatcaggcgttacagaaacataaaaaagcgattaaaccactgttgctggatcaaaaaattgtaacgggccttgggaatatctatgtggacgaaacgttgtggttgagccagattcacccagaaacaccggcgaatttattgacgaaagctgaaacagatcgtttgcatgatgaaatcatcacagagttagaactggcaaccaataacggtgggacaacagtcaatacgttcttaaacgcggcgggtcacgctggggcctttcaggatatgttgcacgtctatggtaagaaagggcaaccgtgtgatcggtgccagactccgattgagaaaattaaagtagcacagcgtggcacgcatttctgtccgcggtgtcagattaagagagaagcggttcaatgacgtattttctaggtttaacgggtggcattgccagtgggaagtcgactgttgcggcattgtttaaagaacagggaatcccggtgattgatgctgatcaagttgctcatcaggtattagcgactaataaatcggtacagacacaattgcaagcagcctttggcgaagcagttgtcaaaaatggtcaagttgatcggcctatgttgggccagcaagtcttcggtaacccagaggctttgactcagttaaatgcgattactgggcccgctattttgacagccattaaacaacagatgcaagcagcagatgcaccgctggttgtgttggatgtgccactgttatatgaacaacactacgagcaatattgcgatggtgttgcagttgtctacgttgaacgtaaaacacaattgcaacgtttgatggcgcgtaaccaattgactatagaacaggcaaatgcgcgaattgatagtcaaagtgatttggcgaccaaaaaagcgcgagcggatttcgtgattgataatcaaggcacacctgcaatgttgcggcaacgtgttttggcgttgttacaacagttgtgtcataacaagtaatacaagcggtcgaacagattattctgttcgaccgcttttttgtttggaaaaggcgaaatgccttgagactgatacattttttgtttagcctgcttgcctggcatgttatactactgttatactaattgttttaaaattggattgaatttgaaacgaattaatcaaaagataagaaggtgtcattatgctatgtccacattgtcatcagaatagttcgcgggtaattgatagtcgtcccacggatgaagggcgagtgattcgtcgtcgccgtgagtgtgagaattgtcgtttccggtttacaacgttcgaacgagtggaacaaaccccattgttggtaatcaagaaaaacggaacgcgcgaagaattcaaccgtgataaattattgcgcgggctaattcgtgctgctgaaaaacgccccgttacaatggagcaaatgactgaagtagttgatgaagttgagaataagattcgctcattgggtgaaaacgaagtctcttcacaagccgtcggagaatacgtgatgcgcttgttaccagatattgatcagattgcctacattcgctttgccagtgtttatcgcgaattcaaggatatgaatgtctttatgagtgaattacaagaaatgatgaataaagaaaagacgaagaaatcgaattaaggaagaggggttagccgatgtcagatgcatttgattttttgagtccaaaagacggcttttcagtgacaaaagctaactatttgaccgatttcgatcaaacagtcgtcacttacttatatcaaccattgatgggggctgttgcttacagtctctatcttttgttatggagtcaaaccaagaaagaaacggaacaacattttcaaacacatgcgactttgttaaatctgttgagtgttgatttacctgctttttatgacagccgcagcaaattggaagcacttggtttaatgcggacgtatcaaaaaaatgagggaactggccgcaagttggtgtatgaactgtatgcgccattgcaaccacaagctttttttaacgatgatttgttaagtgtggcattgttcgaagcggtccgcgaaacacggtttgtggaactccgtgactatttcaagctacgaccggtttacgccaaggattatcaagaggtcactaagaatttcttgaccgttttccatgtgcaaaacgatttattgacgaccgcgccaagcagtgtggctgaaactaaggcaatgtatcaacaaaaagcagctagcacaccgcagtttacctcggttgagttgcggacttttgattgggacctattacaagatgtaacggcgcaataccagattgatacggatcaaattctcaaaaatgaacagggcttgtttaatctccattatttctatggtctagatgagatggacttagcgcgtttgattggcttgacgatgaatgttgctgacagtacgattaatatggcagcgctcgaacagaacgtcttgaacaattacacacgacgtcagagtaaccggcaaacgccagctgctacaacaacgcaaaaaccgttagccgagttacaaaaagaatggcaaaaagccggctttaacgaacaggaattgcagtggctaacagaaagtcagggctacttgccagttgattatctcgaatacttgaaacaaaagaaccacggctttgtcgctaaaaatgaaatccgggcgttaaaggacttgcaaaaccgctatatctttaacaatgatgtgctcaatattttggtcgtttatatcattacgcaatatgatgggctcactcaggcgctagtcgatcggattgcgaaccagtgggctcaacaaggggttaagacggcagcggatgcgattttgcagattcgcgatttccaaaccaaacagacggcaaaggtgcaaaacaatcgccaaacgcgttatcagaacaaaactaaaaaagaaccagtacctaaatgggctaaaccagattatcaagcgccaaaagaaacaaccacacctgagcatcagcatgaactagaagtggcgttgaaaaaaattcgtgaggggcgggaatcgtaatggaaaatatgggtaaagatttgacggattacatgaatcggcaaaagttaaaccaacagtttaataaattggtcgaagatgccttgaacgattccgatgtccaagcatttatacaagctaacaaagaccgcttatcacaagaaacggtcacgcgtagtgccgctaaaatttacgaatacgtcatcgaaaagaagaagttagctaatgggcaaaccactttggcaccgggttatgcgccaaagttagtcttaaataaccattttatcgatgtcagttatgagcctacggcaagtttattacaagagcgcgaacaagctgccttgcatgcacgagtgaagtcaattaatatgccgcgcgatattgaacaggccaagattgattcatacgatccaaccaatcggtttgacgcattgatcaaagctaccgcgtttatcggggcttatcggcaagcaccccatgattttcaccaagccttgtaccttagcgggcaattcggggttggcaagacttacttgttaggtgcgattgccaacgaactggcgttatccgggtttgaaaccacgttgattcatttcccgacattttcagtggagatgaagaatgcaattgggcaaaacaatgtgttagaaaaggttaacgtgataaaaaaagcaccgattctgatgattgatgatatcggtgctgatgcaatgagtgcgtgggttcgggatgaagtacttggcattattttgcaatatcgaatgcaagaacaactcgccaccttcttcagttcaaacttcacaatgactgaattagagacgcatttgacaactagcaaccaaggagacgaaccggttaaagcggcccgcatcatgcaacgtgtgcgctatttagcgcaagaaattgaagttggtggtcaaaatcgccgcttacaaccttagtaatttaggcttgctaaaaaagcaattaagtgttttaatagaatcaatcaatgatgaaagacaccttttaaatgaaccatcgcagagagaaaaacatagctgaaagtttttcacccccatttaattgaccactttcaaaggcaatacaactgatcgggtcgtttccgttatagacgcttaaagttggagaaccaaatgttggggtctcaatctgggtggaaccgcgaaattaattcgtccctgagctgcacaattcgtgcgtctcagggactttttttattgttgatgacaaattagaaggagtgaatagtaatggcagagattcaattaacttttccagatggtgcccaaaaggcatttgaacaagcaacaagtcttttagatgttgctaaatcaattagtacaagcttagctaaaaaggcaattgccggtaaattgaacggtgaattagttgatttacagcaaccaattttagaagatggggcaattgaaatcatcactaaagacgacaaagcaaccgatttgatggcaatttggaatacggcagcctttgttttagctgcaacgttgaaccgtgcttatcccgagatgcaattcggcgaagtacatgcaactgaagatggcttcttctatgataccgaaaacgaagctggtcaagtagctgtgaccgacttaccagacattaaaaaagcaatgagcaagttaatccaagctggcggggcaatcgaacgtgtcagcttagacaaagctgctgctaaaacactatttgctgggcaaacttacaaattagcattattagatgaaatggaaacagaccaagtcttagtttacaaattaggcgattttgctgattttgggttagcaccaatgctagctaaagtgagcgacgttaaggtctttgaactcttatcggttgccggcgcttattggcaaggtaaatcaagtaataagatgttacaacggatttacggaacagcttacaacaaacaagctgacttagatgctgacttacagcgtcgtcaagaagctaaagaacgtgatcaccgtgtgattgggaaccaattagacttattctttgttgatcctaaggttggtgcgggcttgccttattggttgccaaatggtgctaccatccgacgttcaatcgaacggtacatcattgataaagaagttgccaatggttatgaacatgtttacacaccaattctagcgaacttagatttgtacaaacaatcaggtcactgggatcactaccgtgaggacatgttcccaccaatggatatgggcgatggcgaaatgcttgaattacgcccaatgaactgcccatcacatatccaagtttacaaacaccacccacgttcatatcgtgaattaccaattcggttagctgaactagggatgatgcaccgctatgaaaaatcaggtgcgctttcagggttacaacgggtgcgtgaaatgactttaaatgatggacatacattcgttcgtcctgaccaaattcaagatgaattcaagtcaattttgaaattaatgattgaagtgtactcagacttcaatatcaacgattatacattccgtttgagctaccgcgatcctgctaataccgaaaagtactatgctgatgatgaaatgtggaacaaagcacaaacgatgttaaaaggtgctatggatgatcttggtttagattacgttgaagctgaaggcgaagctgctttctacggtcctaagttggatgttcaaacgaagacagctatgggcaatgaagaaacactttcaacaatccaattagacttcatgttgccagaacggtttgaattacaatatgttggcgaagatggcgaaatgcaccgtccagttatgattcaccgtggtttagtatcaacgatggaacgtttcacagcttacttaacagaaatctacaagggcgctttcccaacatggttagcaccaactcaagctgtgattattcccgttaagaatgaattacattatgattatgcaaagaacgtcaaagatgcgatgatcaaacatggtttacgtgtgcgcattgatgatcgtaatgaaaagatgggttataagattcgtgaagcccaaacaagcaagattccttatacattagttgttggggatcaagaagttgctgacgcaacggtttctgtccgtaaatacggtgaagaaaacgctgctgaagaagcttcagacatgtttgtagatgcaatcgttgctgaagttggtaactacagtcgcgatggtaaagatcacaaaacaatcaacctataagcggttattaaaacgtccgaaatgttattttgacatttcggacgtttttttgtttttttaattgcgcacaactaaaaaagcggtataataaatatgtaaacggttccaatcgttgattaatgggaggcgttattatgacgacagaaaaatatcaagcaggttcagcagagcaaccattggacattattaacctctatgacttggaaaaagaagccggcgaagttgttcccaagggtggctttgggtatatttacagtggcgcgggtgatctttataccattaacgaaaatattacggcatttaatcacaaatacatcgcaccacgggttttacaagatatcgaaaatccagatacaactaccgaaatctttggcgatcacttaacatcaccaatcattatggcacctgttgcagctcataagttagtgaatactaaaggggaagcggcaaccgctaaaggtgtggctgattacggttcaatcttaaccatgagttcatttgcgtcagcaagtatcgatgatatggcaaccgcagcagatggcgcaccgcaatggttccaactctatatgagtaaggataacgatatcaatcgtaagattttagatgaagcgatggcgcataacgttaaagcgattgtcttaacagctgatgccacagttggtggtaaccgcgaaaccgataaacgcaatcattttacattcccagtcgggttaccaatcgttgaagcttaccaaacaggtgtgggccaaacaatggatgccgtctacaaatcagctaaacaacgtttgaaccctaaagatgttgaattcatttctgaatacacacatttaccagtctttgttaaagggattcaaacagcagaagacgttgaaattgcacttcaagccggtgctaaagggatttgggtatccaaccacggtggtcgtcaattagacggtggccctgcagcctttgattcattacacgtcgttgctaaggcagttaataaacgggtaccaatcgtctttgatagtggtgtgcgtcgtggtcaacacgtctttaaagcattggctgaaggggcagacatcgttgcaatcgggcgcccagtcatttacggattagcacttggcggtgcacaaggggtacaaagtgtctttaactacttgcaaaaagaattagaattagtcatgcaattagctggtacacacaacattgacgaagtaaaagccacgcacttagtggacaatcattacggcaactaagtacacgtaaatttaaatgcgggatttccttgactttaaattcctaaccgagtatacttattttcgttgagaaataaagcagaagttcccgcttctcgccttagtagacacttgatgtctctgggctgatagtttctaattcggacgaactaagtaaccgaacaagcgggcctttctgttatgagagggccgctttttttattacttagctgcattttctctctaaactttatggaggtgaagagtcatagcaaaagatttgatggttaacgatggtattcgtgcacgagaattgcgtttgattgctcaagatggcgaacaacttggtattaagagtactcaagatgcaattgcattagctgatcaagctaatatggatgttgttttggtttcaccaaacgcaaaaccacccgttgctcgtattatggactatggtaagtaccgtttcgagcttcaaaagaaacaacgtgacgctcgtaagaagcagaaaaccattaacctcaaagaggttcgtcttagtcccacaattgaacaaaatgattttaatactaagttgaacaatgcacgtaagttccttggcaaaggcgataaagtgaaagcttctattcgtttcaaggggcgcgcaattacgcataaagaaattgggcaacgtgtattggaaagacttgctaaagaaacagaggacatcgctaaagttacagcacgtcctaaaatggatggccgtagcatgttcttaatgttagaaccgctaaaggaccaaaaataaaaaatctgtttctgatttattaggaggaaatatcatgccaaaatttaagacacaccgtgcttcagcaaaacgttttaaacgtacaggtaatggcggcctaaaacgcagccacgcctacacaagtcaccgtttccacggcaagactaagaaacaacgtcgtcaattaagaaaatctggaatggtttcaaatagcgatatgagacgtatccgtcaaatgttatcaggccttaaataagccatagcattttcggattcaagcaaaaattagatcagtacagcaacgctttgacgttgtttgttattcaaggaggaaattcttatgccacgtgttaaaggtggaacagtgacgcgcaaacgtcgtaaaaagattttaaaattagccaagggttatcgcggcgctaaacatttattattcaaatcagcaaatactcaagtaatggtttcataccgttatgcattccgtgatcgtcgtcaacgtaaacgtgacttccgtaagttatggattgctcgtatcaatgctgctgctcgtatgaacaacatctcatacagccaattaatgcacggtttaagagtcgctgaaatcgacatgaaccgtaagatgttagctgacttagctgttaacgatgctgctgcatttacatcagttgttgaagctgctaaagctgcattaaacaaataattaaagatcaaaaaaagagtctgggacaaaacttcgttttgttctagactctttcttttatcattataaaattagtggctaataacaatcttacctggggcatgatgactctcaaggagcttgtgaccttcaataatgccttccaaagtaaatgggagcgtcttgaagacggtattgtgtagtaaaccttgatcgatcaattcatttaaatcttgtaaggcggttaaatctgcataatccttacgcggatagacagattggtaattgatgtcagcgcgttgttgatcgtctgttggtaagatggtcgttgaagtgaatgtgccacctggtgcaactaagttattgaggcgttcagttgattctggatcgcgacttaagttgataccgattttagcggtctgcgcaagtcgttcgaagtcagatggctgatcataagcaattacttcttggacaccgaatgagcgcagatagtctaggttagcactattggcaattgcaatcacgtttaaatgagctgctaagcttaattgaacgagtaaactaccaacggcaccactggcacccataatagcgattgtatcgccgtgtttaaagtttgtgaagtgcatcagcgtattgtaagcagtgatgccggcactgggtaaaccggctgcttcagcgatactcatgctggctggcttacggagaatcttcgcagtactagccgttacgtattcgctataagcacccattgatcggtgattgatgacgatttcgccaacgcggtaatcatcgacgtcagcaccaagttcaacgatttcaccaaccacatctgtaccaggaaagattgggaagggtaatgggcgcactgaatcttgtgaaccattccgtagtgcaacatcgtatggattcaatccagcagcgagcactttaatgaggacttggttgtcctttggagttggttgaggctgatcgaaacgttcgaaaacgtcagggccgccaaagtgattaaaaccgaatttttccataacaaacacatcctctcaatttctttaaacgtaccagagttggggctaaaagtcgattagtttgacttatggatttaaatggattaggaattagttggaaattatggaaattaaccgcgtaaaggtgcaatttggtgtcaaataccctataattaatcagtgactagattaaaaagaagtgcgtcagtaggcggttatatttcgaggactagcctagtctggcgaatgaccaacttgttggtcgtttgacggacgtcgctagccgcaaaaatatgcctactgaggcacgttagaaaagaagtgcgttcaaacctggtatactccgagcactagcctaacaaggcgaatgattgctgcaagtaatcgtttgacttgtgtcgctaggcacaggaatatggtttgaaaagcacgttaaagaaaagaagtgcgtcatccacggttagcttccgagcatttgcctaacttagcgaattggcgctgcaagcgccgatttgataagtgtagcaaagcgcaagaagctgttgatgaaagcacattaaagtcgaggggacagtacatgctaaagaatttcaagccaacttggatggtcaatgccatctacgacttaacaccagaacaacttaaggcaaaagggattaaggccgttttaacggatttagataatacgttaattgcgtggaataaccccgatggcacaccacagttaaaagcttggttagcacagatgcaagctgccgaaatcaccgtgatggttgtttcaaataacaaccatgatcgcgtgcaacgcgcgctcagtgaattgcaattaccattcattgctcgggcgaacaagccattggcaactgggattaccaaagcgaagaagcagcttggcctttcgcgacatgaagtggtgatggtcggcgatcaattgattaccgatatgcatgccggtaatgtggctggcgtccggacgatattggtcaaacccattattgacagtgatgcctggaatacatcgattaatcgattctttgaaaaatatattatgcaacaactactaaaaaaacacgcagatttaacttggcgggaggatttaaatgactgaaacacaacaaactgaggaagaactattttgtattggctgtggcgctcgcatccaaacaacggacaaagaagcactcggctatacgcctaattcagcgcttaaaaaaggcttggaaacgggtcaattgtattgccaacgttgttttagattacgacactacaacgaaatcagtgatatcaaattaaatgatgatgatttcttagccttattgaaccaaattggcgacagtgacgcgttgatcgtgaacgtcgtcgatatcttcgattttaacgggagtttaattccagggttacatcgttttatcggcgataaccccgtgattttagtggggaataaggttgatatcttaccatctgctcttaacccaaataaagtgatcaattggattcaaaaagaagcgaaagaacatggcttacatccggttgaaacgatgttggtcagtgctaaaaaagggaattcagttgatgaattattggccgtgattgaacgcgaacgtaaaggccgcgatgtctatgttgttggggtgacgaacgttggtaaatcaacgttgattaaccgcattatcaagcaaactgggattttagatagcgacgtgattacgacgtcacaattcccaggaacgactttagatcgcatcgatattccattgtatgaagatgatcatgcattgattgatacaccagggattatgcatgcccaacaaatggcgcattatttacatgataaagacttacggttgattgcgccgcaaaagcggattaaaccaaaagtataccaattaaatgaacaacaaacattgttcttgggtgggttagctcgttttgatttcattcaaggtgcacggcatggctttgtcggttattttgacaatgaactttacattcaccggactaaacttgaaaatgcagatcaattctacgctaagcaattaggggacatgctacagccaccacatccagaagatttagctgattttccagaactccaacggtatgaattctcaacaaagcaaaagagtgatttagtgtttgctgggttaggctggattacgttaccagaaaatgtcgtggttgcgggatatgcgcctaaaggtgtctcagtcatgattcggaaagcattaatttaattagggaaggaagtatcgcacgtgttaacaggcaaacaaaaacattacttacgcggtttagcgcaaaccactaaaccactttttcaactaggcaaaaacggcttaagccaaacttatttcgaacaaattgaagaggccatcgaaaaacgagaactcgttaagattaacttgttacaaacaacagaagtgaccgttgatgaattagccaacttcttaaaacaacatgacagtcgcatcgaaattgcgcaaaaaattggacgcacattggtgatttataaagcttcacggaaagaaaaataccaaaagatttcaacgattgttactaagctcggacgctaataaggcggtgatcagatgcaaagtgcaacgctaaagcagacaaatcatgtgactgaaccggacgtgttggttgtagaagatggccatcgcttgcaagtcggcattatggggggcacatttaacccgccacacatcggtcatttagtgatggcagaacaagttcgtagccaactcggtctcgataaaattttgtttatgccagatgccaatccaccgcacgttgatgagaaaaaaacattaccagcaaaacaccgtgttgcaatggtagaacgtgccatcgctgacaattcgcattttgaactcgatttaacggagattgaacgtggcggtgtcagttacacctacgatacgatcgtggcattaaaacaacaacaccctgaaatcgattattatttcatcattggcggtgatatggtcgactacttgcctacttggtatcgaattgatgatttagtgcagttagtccaatttgttggtgttaaacgaacagggtatgctcaacaaacgccgtatccagtcttatgggtggacgcaccggtaattgatgtcagttcaacgcaaattcgcaataagattcaacaaggctgttcagtgcggtacttgttaccggacccagtctttgaatacattcaaaaagagggcctctatcatgagtgattttgtttatcaagaaaacatcgtgccgtatacacgggctgagttagtggctaaagttgccgctaacttatctgaaagccgatttgaacattgtttgcgtgtggaagccaccgcgattcaattagcacaaaaaaatggcgcagatgttgaacgcgcggcaattgctggtttagtgcatgactatgctaagcaattaccagatgaaacgttcattgaagcgattaaaacgcaaggctttgatccagaactactcaattacggtaatgccatctggcacggtgttgttggtgcttatttcattgaacgtgatttagaaatccatgatgaaacgattttaaatgctgtgcgtcgtcatacgattggtgcgccagaaatgaccttgattgatcagattttatttgtggcggattttgtcgaacctgggcgcaattttccgggcgcagaagctgctcgtgagacagcaatggctgatttagcagccggcgtgcggtatgaaatcttaaatacattgacctttttaattcagggcaagaagcagatttatccgaaaacaatcgacacatacaatgcttgggtaccgactcaagccaaataaaggagaactttagtgaaaagtttagatattttaaaaattgctgtgcaagcagctgatagcaaacgagcagaagacatcgtcgcaatgaacatggaaggcatcagtttattagctgattacttcgtgatgttaactgggacgtcagaacgtcaattaggcgcaattattgacgccattgaagacgcagaagaagaaaatggcgttttcgtaaaacacatcgaaggtaaaaagggttcacgttggatcttgatggactttggcgatatcgttgtcaatgccttcatgccagaagaacgtgccttatacaaccttgaaaaactttgggatcaagcaccacttgttgatgtttccgaatggttggatgaagaatgatttaccaaagctttgcaaccgtctatgaccgtttgatggaccattcattatatggtcaatggcgggattacacgttgcagacgttacaaaataaacatcgagtcctagaactagcttgtggggctggtgatttagccatcttgctaaaacaagcagggctagaggttgtcggcttagatttatcggccgagatgttgagtatcgcttctgaaaaggcttctgaagccgaggtcgagttacctttattacaaggcgacatgcttgacttaggcgaaattgggacgtttgaagcggtcacttgttttgacgactcgatctgttacatgccagatttagcgcatgtccaacaagtttttgaacaagtttatcgaaatttagagccaggtggtcaatttctatttgatgcccattcactttatcaaatggatgagcttttcccaggttttatgtataacgataagacggcagaaacggccttcatgtggacgagttacgcaggtgaagtaccacattcagttgaacatgatctcagcttttttatctgggatgacgagattgacggttatcaagaacttaatgaattacaccatgaacgaacttatccggtggtagattatgttgcagcattagaagctgctgggttcaagaatgtatcagtcagtgctgattttggccaagaagccgttcaagaagatagtgtgcgttggttctttagcgcagtgaaataggcggaggacgcatgagaattacggggattattgcggaatataatccgctacataatggacatcggtatcaattgcaacaggcgcgggtagcttcgcacgcagatttagtgattgtctgcatgagcggtaactatgtgcaaagaggtgaacccgcgattttggacaaatggacgcgcgcacaacttgctttgagcaatggtgctgatatggtcgttgaattgccgtttgccagtgctgtccaacctgcagaccgttttgctgatggggccgtcaagttattggcggcgcttggttgtcagaccttagcgtttggcagtgaatatccaacgtttgactatcagcaagtcgggcaacagattttagctttaaaggccaagtcacagacgtttattgattatcaaaaaacttatgcgacgcagctcaatgagttttatcaagcagaattaaatttaaatttagatcaacccaatcacctcttaggggtcagttatgcggttgccaacgcgcaacttgaagtgccaatgcagttgcttgcgattaagcgtgagcaggcacaacacggcgatcaaacgattggcgcgggacaatttgctagtgccagtgctatccgacaggcggcaacaaagggtgatgactgggcacagttagccccagtgatgccgcattcgactttaacagcgctccagactcaatcgcatctggattgggaccaactatggccgctattgaaataccgaattgaaagtacaccccttgcccaacttcggcagatttatcagatgtcagagggcttggagtaccgtttcaaaaaggtgattcattcagtcaatcggtatgccgagttgttacaggcacttaaaacaaagcgatatacgtatgcacgcttgcaacgggtttgtttatacgtcctgttgaatattcaacaaacggatattgaacaatcattagcgcagcggcccatccatttgcttggctttaaccaagtcggccaggcgcatttgcacacgttgaaaaaaacgctcgatcaaccacttatcagtaaggtctcagctaaattgggtaccgaagagggcccactggggttagaggtgcgagttgatcgattacaagaacagtttggctggcaatcacagaattttgcccgccaaccgatttttaaccaaagaaaggatgacgagcattgttaaaatggacagtccaatcattattaaaacatcgtgatcatccattgatgtttaaagaaacattgatgttaaaagaaagtttacaaaaaagagaagctgatgtcctagatgctacaccatttgtagtagacggtggattaacggttgaccagcgcgctgtaattgcacgcgtacatgtggtcgggacattaacagtgccatcaacgcggagtttagatccagtagccttgccaatggattttgaattcactgaaatctacgttgatccagaagacgagcagttgggacgatttacggacgaagatattttgttcccaatcgaaggcgaagccctagagctacaggtagctgttgaagatcacattctcttgcacattccaagtcacatcctaacaccagaagaagaacaagatgatgtgatgccagccggacagtcgtggtcagtcatttctgaagaagcctatgctaagcaacaggctgaagaagaaacggcacccaatcctgaatttgctaagcttaaacaattattagaagaacaaaacaatgacgccgactaagtttggcgtttttttatacccaatttgttaaatggaccggaccaaatcagttaaaatgcttttatttaaagcgtaattctgctaacataaacacagtagacgcgttgtcgttttgatagtcaacaacgcttaaatttagaaatcatttaggaggccttttacatgagtcaaccacaaatcggtgtcatcgggatggcagttatgggcaagaacttagcattaaacattgaaagtcgcggttacaccgttgcgatttataaccgaacaggtgctaagacagaagcagtgatgcaagatcacagcgaaaagaaattggtaccaagctatacaattgaagaatttgttcaatcattagaaaaaccacggcgaatcatcttaatggttaaagccggcgctggtacagatgctgtcatcaacgaattgttacctttattagataaaggtgatattttaatcgatggcgggaacaccttctttggcgatacaattcgtcggaatgctgaactagataagtcaggcattaactttatcggaatgggtgtttctggtggtgaattaggcgcattagaaggcccttcaatgatgccaggcggtcaaaaagaagcttatgaattagttgcaccaatcttagaacaaatgtcagcaaaggctgaagatggccaaccatgtgtcacatacatcgggccaaacggtgctggtcactatgttaagatggtccacaacgggatcgaatatggtgatatggaactcatctcagaaagttataatttattgagaaacgttgttggtttatctgttgaagaaatcgctgatgtcttcaaagaatggaaccacggcgaattagacagttatttaatggaaatcacagcggacatcttaacgcgaaaagatgatttagaaacggataaaccaattgtcgacgtcatcttagattctgctggtaacaaaggaactggtaagtggagttcacaaagcgcccttgaattgggtgtgccacaatcattgattacagaatctgtttatgcacgttatatttcagcaatgaaagacgaacgggtggctgcaagcaagattttaccagccccaaccgttgctaaattaacagaagataaaaaagaattaatcgaaaagattcgccaagcattgtacttcagcaagatcatgagctatgcgcaaggctttgaacaaatgcgggttgcttcagatcaatatgactggtcattaaactatggcgaaatcgctaagatctggcgtgaaggctgtatcattcgggcccgtttcttacaaaagattacggatgcctttgataaaaaagctgatttaaacaacttattgttggatgattacttcttagatattacaaagaattatcaaggcgctgttcgtgacgtagctgcaatggccatccaacaaggtgtgccagcacctggtttctcagctgctatcacatattttgattcatatcgttcagaagtattaccagcaaacttaatccaagcacaacgcgactactttggtgcgcacacataccaaagaacagaccgcgaaggcacattccattatacttggtataaagaacaatagagtgcgcaagtagacggggatgcgctgaggattagtggaatatcgtaaatgagcggtgaaaccgatcgtttgcggtatgcaactaaccggaagcggatgtctactggagcacgttttagtacaagagtgctgactattgcatttagtcattgagcattaataaaaaattgccattaatcccggttttaggattaatggcaattttagattaagcggaaatggctgcgacgggatgcgcgttttaaaatagagtgatgagtcgaacgtttttggctttaaggattaacagaaaaatgatgcttatggcggttcttagccataagcatcattttacggttaaccggaaaagacagttcgaggaagcacgtttctctaaacacccgagccgattattaaggcgcaggtgttttttcgattattactaaatcgccatcagatgagagtcagattagttagttatttaattggaactatgctagaatggaaaggtaagccgattttggcgcttgatgtttcttagagaattcttatcattgattagaatttagagagtccattaaaaattcttttttggggagtgactaaatgagtcgcatattgattattgaagatgagaaaaatttagctcgatttgtggaacttgaattaaagcatgagggttatgagacagaggtccatttcaatgggcgtactggtttagaagctgccttgaatgaagaatgggacgcgattttattagacttgatgttacctgaattaaacgggttagaagtctgccgtcgggtccgccaagttaagaatacgccaatcattatgatgacggctcgtgattcagtgattgaccgtgtttctgggttagatcatggcgcagacgattatatcgttaagccttttgccattgaagaattattagcgcgtttacgggcattgctacggcgaattgatatcgaaggcgaacataacgctgctaaacaaacgacggttacttaccgtgatttaacggttgaaaaagaaaaccgagttgttcggcgtggtgatgatgtgattgaactaacgaaacgtgaatatgaattattattaacattgatggaaaacgtcaacgttgttttggcacgcgatgtcttactcagcaaagtttggggttacgattcggatgttgaaaccaatgttgtcgatgtttatatccgttacttacgaaataaaattgatcgttctggcgaacaaagttacattcaaacggttcgtggaatgggttatgtgatgcgctcgtgatgcaggacgaaacggtagcatcaacaacaaataagggtcgtaaaatatcgttaaaggtcaaatgggcagctgcggttgggttggccatttttatcacctttgcgattttttcaattgtgatctttagtagtatctctaatatcttgctacacagagaagtcgacaatgtgcacgatacggtgaccgtcgtacaagcgagattgtccagcaatgggccacatcttacagaaggctttgtcaccaatcaattggatccgaaccgtcacagtcctaaagccatctatcaagatgcggttttaacgcggttagcacaacaggatgttacagttaagatttatgatgcaaacaagaagggtttgtttgcatcgcgcggggcgattggtccgtttccaaaaggcgatacggatacattaaagcgcaaagctatttttggtaagatgcggctgattggcattagtccgattaagacaagtcaaaaccgtgtaattggttatgtagaggtggtcaataacgtccgtgattataaccacgctatgactgaattaagaattgtgttagttgtggttgtcttttttgctatgttatttagtgcattgattggctatttattagccaaccaattcttgcgaccaatcgaagttatgaaaaaaacgatagaagccattaattcagagcctaattcagatgtccgaattcctgagactgggcatagtcaagatgaattatctgatctggtcagtgcgtttaatggtatgttgaatcgaattcagcattatttcgaacagcaagaccagttcgtcagtgatgtttcgcatgagttgcggacaccagttgcgattattgaagggcatctacaactgctcaatcgatgggggaaagatgatccagaggtactggaagaatctttagcggcttcgttacaagaaatcttgcggatgaaaaatttaattcaagaaatgcttgatttaacacgggcagataaagtcgtgactgaaggaacgactgaagtgaccgatgtcggggaagttgttcttcagaattaccataacttcgagatgttatatccagaatttaattttatgctcgacaatgatttgcaccaaccagcgctagtgcatgttaatcgaaatcacttagaacaaattatgattattctgttggataatgcgattaaatattcaacgatacgtaaagaagttcatattgccgtcgctagtgatgagcggtatgcgcaagtggccgtgcaagactttggtgaaggtatttcggaagaagataagaagaaagtctttcaccggttctatcgcgttgacaaagcacggagtcgggaaaaaggtggcaatggattgggattagcaattgcccaacaactcgttgaaggctatgacgggaatgtgtcgctagaaagtagcgttggctacggttctgtttttagagttgagttaccactgattcgtgaagtagaaccaaaatcagaagaaccagttaatacggattaaaaaagcggtgcgcttcaatcatctaattgattgaggcgcaccgcttttttttgttggttaagcttgtggcttatgccgttgcttacctgagttgcgtttgccagctactttaggtgtagcgacagttgggttgcttgtttctgttggtgtttctgtgacgtcggcagctggtttgactgctgctttttgagtgaacatttcttttgtgacaaccgtgacgattggtttttccttaatttcttgatcgatccgttttttaacacgaggcatgatgatgaatgtcgtgattaattgttgaatcaccatgataatcccaccggctaagaaataaagtgctaaaccggctggtgcaaataacgaaatgaagaatgtaatcgcaggactcattaggacggttgtttgcatttgtttcttttgttcagcaggcatcccgactaatgaaagtgcactttgaccgacatataagagggtcgcaatcacagtaatgataatgtttgggctcccaagaccgatcccaaagaagtggctacttgaaatttcaggtgagtattggatggcttgatacaaaccagagaagattggtaattgaattaataaggtcaaacaaccaagacttggcatcatgcttgaatcattttccttataaaccttcatcatcaactggctaagttcagccttttcttcaggggttgttgccgctttttgttgttcttggataatatctaattgcggtttcaagcgacgggtcttttcttgttgggccgtcatcttattcgattggttcaacattaatgggagtaaaatcatccgcacaacgaatgtgatgatgataattgcccagccgtaaccattgatgccaccgaaaacatcagcaatgcgttccataatatgttggagcggcacggcgatgtatttataggatgaaccatagattaagccggttgggactttgggatggctgctcattttttgtggaacacagccagcgagaaagaatgtaacggtcattgtaagcatcgcgagtgtcgcgaagcgtttagaatttttcataaatttagccctttcaagataagtttcaacaagtgtaactatacttgaaggggctaggtttttcaactgacaaccgaaaatttatgacacgctgacacattttcgagcggtgtttgaatgacacggtcgacgcgcccactaggggtgggagaagctttgacagcaccgataaatttttcgagtgcgtctgctgggcccatcgcaataattttaacggagccgtcgtcacgattggcaacggtacctgtgatatggagtttatcggcgaccaatttggtcatccagcgaaatccgacgccttgcacgcggccatagacttcaagttgaattgcattttgcattgtcatcacctcctcttcattgtaagctgttcaacccgatttggcgattaaaaagcgacccttgatagaatttacccactaagtcgcgtataatagaaagtactaaatagactggagcacaacatggaatacattcaatcgaatcaaaacactaaaattaaggcggctaagaaattaaccgttaagaaaaaccaacgtaaagaaaatacgtatctactagagggctggcatttagtccaagaagcaatccaaaataaggccgtcatccgccaagttttcgccactgaaaaatatgtggacgaacgcgcattgcgcggtctttacgatgaaacttttgaaattgcaccagaagtggcgcaacacttgagtgaaactaaagcaccccaaggcatttttgccgttgttgaaatgtctgaaacaccggtaccagaaaaattaacgggtcgttacttattattagatgctgttcaagatcctggtaatatcggcacaatgattcggacagccgacgcagcagactttgccggcgttgttttaggcaatggcagtgttgacttgtataatccaaaactcttgcggtcaatgcaaggcagtcacttccatttaccaatttatcaaggtaacttgatggactggatgaagaaattcaattcgcaagacgtcccagtttatggaacggaattaaatccagaggccatcagttatcaagatgtgcctaaagcaaatgacatggccttgattctaggtaatgaagggaacggcgtgaatgaaaacgtcttagcagccacaacgcaaaatatttacatcccaattccagggaatgctgaatcattaaacgtggcagtcgcagctgggattttaatgttcaagttgattgaagcttaattcttaattttttctaacaaatgtaactttttaaggcgtttaacttcttttttgaacgaaaagctgttatccttgtggcagaatttgaatttaaaaaatgtcaggagtctttgaatgaattcaacagcaaaatggtacgatgacgcggattacatggctctaattgccgatttattagctaaagatgaagtccaaaaattagcgaactatacgcaacatcatcattcagatcgtttggaacattcgctaagcgtctcttatcgcagttatgaacttgccaagaagtggcatcttgatacgcgagcaattgcacgcgcgggcttattacatgatttattctattatgactggcgtgatacgaagttcgatttaggcacacatgcttatatccatccgcgcattgcgcttcggaatgccgaaaaattaacagaactctcacctaaagaaaaagacatcatcgttaaacacatgtggggcgcaactgttagtcgtccgaaatataaggaaagttacattgtatcgatagtcgatgattattgtgctgtgacggaattttgtacaccaatgtggacgaaatttaaacaaaaagttctccgccaaacaccggcaattaacaagtaaagatgcttcaagctgataggttgctttttgcagcctttttcagtacacttcttattaataagtgtgaggtgaaaataatggtgattgtaaaagaaaacgcaaatgctgactgtcaagaggccttccaactgtgtcctaaatttgaaaagactttttcaattttaggtaagaagtggaacggcctgattatcgatgtcctattagaaaacggggcacaacggtttaaaaacttagtgcacagtgtgcctaagtgcagtgatcgcgtattggttgaacgattgaaggaactagaacaagaaggcattgttgcgcggattaccagtgatgattctgcgttgattgaatatcgattgaccactaaaggtgaagaattagcgccagtaatggctgctattcacgattggtcaaacgactggtatgcgacagaagcctagttgctaattgcggttatttacgttaaaatacaattattaaacaaagacgaaaaagagtaacctaatcattagttttcagggagaataatcagttgactgcaagttattcaactaagtttaggtgaagttcactttctgagttgaccattggtccggtattgcccgttagcgcaaacttgagtgtatgactggaatggtcgtaaactagggtggtaccgcgaagcttcgtccctttttgagggacgggctttttttgttgaaaaaaataaggaggaattgcaatgtcattgaaggaacaattagaaaacttacagcaaaagagtctgcaagaaattcaaagagttgttgatttagaggcgttaaatcaaattcgagtggaagtgctcggtaaaaaaggaccgattacagaagttttacgcggcatgcgtgatttaagtaatgaagaacgacctaaggtgggggcatttgctaatgaaatcaagagtgatttggcagaagcaatcgaaacccggaaggcagaattagaagccaagaaggcagcagcccaactggctcacgaaacattagatgttacattacctggccaaccggtcaaaaaagggaccccgcatgtcttaactcaagtgattgatgatttagaagatttatttattggaatgggttatcaagtcgttgctggctatgaagtggaagatgaaaaacataactttgaaatgttaaacatgccagctaatcatccagcccgtgatatgcaagatacgttctatattactaatgatttattgatgcgcacgcacatgtcacccaatgaagcacgtgacttggaaaaccatgactttgctaatggtcccattaagatgattagtcccggccgtgtttaccgccgtgatacagatgatgcaacgcattcgcatcaattctatcaaatggaaggccaagtgattgataaaaacattacaatggcagacttaaagggaaccttagaatacacgattcaccatatttttggtgaagaccgtgatttacgtttccggccaagttactttccattcacggaaccatctgttgaagtggatatttcttgtttccgttgtgatggtaaaggctgtaatgtctgcaagcaaactggctggattgaagttttaggggctgggatgacacatccgaacgtcttaaaagccggcggtgtcgactcagatgtctatggtggattcgcctttgggctcggggttgatcgctttgcaatgttgaaatatggtgtggatgatatccggaacttctacttaaatgacgttcgattcttaaatcaattcacacaggagggctagaccatgaaagtttcttacaactggttaaaagattatttagatttaacaactgccccagaggcattggctgaaaaaattacccgaacagggattgaagtggctgatgtcgcgcaaaagagcgcgggcttgaaaaaaattgtggtgggacatattttaagttgtgaaccccatccggattctgatcacttgaatgtttgccaagtggatgttggtgaagatgaacccttccaaattgtttgtggtgcacccaatgtcgctgctggccaatatgtagtcgttgcattacctaattctcggattgctgacaacgttaagattaaaaaaggcaagatgcgcggcgtggtttcaatggggatgatttgtggcttacaagaaattggctttgccgatagcgttgtgcctaaggaatatgttgatggcatctttgtcttcccagaagcaattgaacctgggacagaagtttatgaagctcttgggatgactgattacattatcgatcttgacctcaccgctaaccgagccgatacgcttggcatccacggtgtggcccatgaagtggccgccattgaatcattgacacctcattttgaagatatcgtagtgactgaaagcaacgttcaaacagctgatcaattgactgctcaagttgctgatgaacaattagcaccaagttatcacttgcgtatgttgcaaaacgtgaccgtccaaccaagtccaatgtggctacagacgcgtttatggaatgctggcattcgccccattaataaccttgttgatgtgacgaactacatgatgttaacgtatgggcaacctttacacgcgtttgatgcggatgctctaacgggtgatcacaaacaaatcgaagttcgtttagccaagacgggcgaaaaattaacgacccttgatgaaggcaaacatgacttaacaaatgaagatatcgtcattacagatggtcatcgaccaattgcgctagcaggggtcatgggtggtttgaactcacaaattactgctgatacgaaaaatgtgattatcgaagccgcagtttttgcaccaactgcagttcgtaaaacggctcaacgccataacttgcgttcagatgcgtcatcacggtttgaaaaaggcgtgaatgttgctgatgttcaaacagccttagatgctgctgctatgatgatggcagaccttggtaatgggcaagtgactgctggtacagttagcccaactaacttagtgccaactgacaaagtgattgaaatcgaagctgaccggattaatcgcgtcttaggcacagagattgcaacgcaaacaattgttgaattattagaacgatttggttttagtgtggtcaatactgataatcatttaacagtaacgattccaccacggcgttgggatattgaaatccaagcggatatcattgaagaagtcgctcgtttatacggttacgataacttaccaagcacattgccaactggcgatatgacaaccggggcattaacgactgaacaaaaggcactccgtaaaacccggcatacacttgaaggtgctggtttaacgcaagcaattagttatgcattaacgacccctgaaaaagcgcgtcaatttacgcttgttgattcggcgctgacagcacttgattggccaatgacgcaagatcatgcgcacttacgcatgaacttgattactggtttattggacgatgctgcttacaatgtggcacgtaaacaaactgatcttgcactatacgaacaaggacgggtatttttaaaacaagcagacgaccaagttcggccaacagaaattgaatatgtggctggcttaatgagtggcaatcgccaaatgaagacttggcaagctgccgcagcaccagttgatttctacacaatcaaaggtgtggttgaaatgttgatggcaagttacaacttagcggatgcaatcagttatcaaccaacacaagcttatccagaaatgcatcctggccgaacggcagccatttacgttggtgaacaactggttggatttgttggtcaaattcatccagcagttgcgaaagctaatcatttaaaagaaacttatgttttccaattagatttagcacaaatcctagccttgccaacccaaacagtgattgctaaaccagcacctaaattccctgaagtaacgcgggatattgcaattcaggtgtctgatcaagtttcaaatgccgcaattgttgaagccatcaaagcaaagggtggcgcccacttagtttcagttgaacttttcgatgtttacgcagggagtcatattgaggctggtgagaagtcaatggcttacaccttaacgtacctcaatgaggcagctactttaacagaagaagaagttaacgctgcttttgaaaaagtagtcgctgaattagttgctacttttgatgccaaaatccgttaatctcgaatctttaatgcaatttttgaataatttggtataatgttttaaggattgtatttaaaagagcaattaggaggtcatcctttgaagaaagttgatcaaaaggagccagtaaatcaagaaaaagcggcacaatcattgtacgaagaacgccgtgcagaaaaaaaagcagcaaataaaattgtctattggattatcggtattctattagcgcttgttgtcattattggattcatgggatatcgctacgtacaagcatctcttaaaccatacgacaccaaagcaaaacaagaaattaccgtgcgcattcccaacggctcaacgaataaacaaatcgctgctattttgcaggataaaaaattaattcgaagcgcgccagtctttaattattatgtgaagactcataatttctcggatttccaagccggttatcatgtgttgaaacaatcaatggggttagataagatcatctctaacttacaaaaagaaggcacaccaacccgtcctcgcgatgtgaagggcaaattgttagttaaagaaggggtcactttagaagaaattgcggccgaagttggtaaacaaacaaaattctctaaagcagccttcatcaaacaagcgaatgataagcaattcttagcaagtttagagaagaaataccctgcattattgtcatcaacaatggctcaaaaggatgtccgctatcacttagaagggtaccttttcccagccacttacgaagtttataaagatagtacattaaaagaaattatcaccgaaatggtttcaacgatggatcaaaagatgcaaccttattatgcaaccattaaggataagaagttaaccgttcaacaaacgttaacgctagcttcattggttgaacgtgaaggggtcacagccgtcgatcgccaaaagattgccggtgtcttctttaaccgtttagacatcgatatgccaattcaatctgatatttcagtaatgtatgcattaaatacccacaagacacacctttataacaaagatactaaagtcgattcaccatataacttatatatcaataaaggttatggcccaggaccgtttaactcacctagtttacagtctgtcacagccgtcttgaatccagctgatcgtgatcaaaattatctctactttgttgctaacttgaagacaggtaaagtatattactcaagaaccttcgaacaacataacgatacaacagattcgattgaagattaggttcatttaggattatcgaagtcgaccgccattggaggtcgacttctgtttgcccaaaaagaagttgagaataaaaggagcgtcccatgtccagtcaaaaaaaagcacccatcattatcggcgttacaggcgggtccggtagcgggaaaacaaccgttagccaggctatcgcccaaaaatttgcgaatcactcagtgatgttattaccacaagatgcgtattacaaacggcaagatgttccgtttgaacaacgccaacaaacgaattatgatcatccagatgcttttgacaacgatttattaatcgaacaagcatcaatgttaaaaaatcatcaagccattgaacaaccggtctatgattataaaattcataatcggacggaggaaattcaacgggttgaaccgcaagatgttattatcttggaggggattcttgtattggctgatgcccggttacgggatttgatggatattaaggtttatgtggatactgatgatgatattcggttattaagacggatgcatcgcgatatggaaagccgtggtcgaacgtttgatgatgtggttggccaatatcttaagacggtaaaacccatgttccatgaattcattgaaccaaccaagcgttacgctgatttaattgtcccagaaggtggcaataatcgcgtggccattgatttacttgtaacaaagattcaatcaatcctaaatgccgattaaagattgagatttgacaaggacgtacacagtaattaagatagtcagtattattaattaaaataaagaggtggataaaatggtacaaaaaacttatccaatgactgcagaaggcaaagaaaagttagccgaagaactagaaacactcaaaatggtaaaacgaccagaagtcattgaccggattaaaattgcacggagctttggtgatttatcagaaaactctgaatatgaatcagctaaagatgaacaaagctcattggaaacacgcatcgcagaagttgagaatatgttacgctttgcagaagtaatcgatgttgatagcatcgcagctgatgaaattgctgttggtaaaacagttagctttacagacgacgaagatggtgaagaagaaacttaccaaatcgttggtgctgcagaatcagaccccttcagtggtaaaatttcaaatgattcaccaattgcccaagcattacttggcaaacacgttggtgataaagtagctgtgcaaacaccaggcggcgacatgcacgtcacaattacagaagttaaataaagtgcgtttcgaacgggttagtctttgaggattaacgtaaaaacgggtgttatggtcgaattttgaccatgacgcccgttttgtagttaaccggaaaaggttgttcgaaaaagcacgtttaagaatagagtgcttttgggtgcggttagcaactgagcattaatacaaaattggcagtcatccagattttaggatgactgccaattttagattaagcagaagttgttgcagccaaaaagcacgtttcaaaaaagccacggaaatcaatcccgtggcttttttattttgccgttaattcgttaatcagccttgagacggattggtgtttatctggtttgcttgtataataatattaatcagttgaaaggggaccgtaaatatgccgtttatctggcgcgtttttttaataatagaagcgattatcttcgggacgttcatttggcagatgattacgatacccgcaaatttagtgttcatcattgcaggtattttactcttagtctgggccaacaaacgtcgtagtaaaggtaaaatcggtgtctggacgactttgttaacgatggtcggttgcgtagctgttacggtaccactgttaattaatttctcgttatggttaatgattattgttgcggtcgtctttttagccttaaatcatagccgaatgggacagtttagcagccgcaatatgaatcagttgtttgataatgccccttggcgcaagaaaaaatttattcccgttaatacgacggaacccaccgcgaaaaagacaacagtcaagcggcatagttggtttggtcatcagacaattggcaataacatttttgaatgggatgatattaacttcgcggtcgctgccggtgatacaattatcgatttagggagcaccattttacccaagaatgacaaccatattgtcatccgtaaggggtttggaaagacacggattttagtgcctgtcgggaccggtgtctatcttgatcactctgcaatgttagggagtgtgacaatcgacaatcagcactataatttgaaaaatgagtcgattcagttgtatagtacaaactatgatgaagaaagtcgccaccttaaaatcattaccaacgtaatgattggtgatcttgaggtgatcttagtatgagcaagttaacgcggagctttatatggatcagcacgagtttgttgacgcttctgttttcagtggcgttattttttgcgtatttctacagtacgcatcaggaacaatggctgattagtttggccacgaagcaattattctatgtaccactgattgtttatattgtggtggccgcaatggcagtaggctttttagttaccgcaatcgtctatcttgtcgtacgtaagcaattatcccatactgaaagccagttacaatttttactttctggacagtatgaatcgcctgtttttcagattagacagagcgaaaccaatgactacgcgatgtcaatcgagcaaacagttgaacaattacgccaaaaaatgatacgcttacaacaagagattcaaagttatagtgatcggccgaccgtgattgctggtgaaaccaaggaagaaattctagcgcaagaacggcatcgtttagcacgcgagttacatgattcagtgagtcagcaactatttgcggcgacgatgatgttgtcggcactcagtgaagttgcgcaaaaacaagctgataacgcgcagatgttgcagtccttaacgacagttgaacgggtgttaaatgaggctcaatcagaaatgcgggccttactcttgcatctacgaccagttaatttggaaggcaagagtttacgcgatgggatcattcagttattgaacgaattgaagaccaaaattgcgattcagattacatgggacattgatagcataacgttaccaagtggcatcgaagataatttatttagaattgtccaagagttgctgtcaaacacactacggcatgcgaaggcccaagagattgaagtatacttgaaacaactcggtcagagtgttttactaaaggtaattgatgacgggaccgggtttgatacgaatgctgagcaaaaagccggcagttatgggttaaacaacattgtcgaacgggcccatagtgttggagggacggcaaaaattattagtttgcctaaccagggaacgagtgttgaaattcgagtgccactattaaaggagaccaattaagtgattaatgtattgatagtagacgaccatgaaatggtgcgattaggcatctcaacgtatttaggggttcaagacgatattcatgtcgtcgatcaagccgtcaatggtaaagaaggtgtcgaaaaggcgcttgcattacgtcctgatgcgattttaatggacttagtgatgcctgagatggatggcattgaggccaccaaaacgattttaaaggcgtggcctgaagccaaaatcattatcttaacgagttttatcgatgatgagaaagtttatccggcgattgaagccggtgcggccagttacatattaaaaacttctacagccgaggaaattgccaatacgattcgtaaaacggcgcaaggacaatcggttttagagccagaagtgacgaataagatgatgaatcgcttaacacatccggctgaacctaagctatatgaagacttaactaatcgcgaacgtgaagtcttaggcttgattgccaaaggccgtagtaatcaagagattgcggatgaattattcattacgttaaaaacggtcaagacgcacgtttcaaatattttggcgaagttacaagtggatgatcgcacccaagcggcaatttatgcgattaagaaccaactagtcgattaatcaggaggagttcaacatgcaaattcaggtgtcagatgcagcaagtcaatggtttcgcgacgaattagccttacaatcgggggatgcagtccgcttttttggcaaagtgtatggtcaaacggccgtgcatgatggcttttcattgggcatggaacgcgctactgttgagcagccaattggttcggttgttaaagatggtatcacctattttgcgagtcaatcggacgaatggttttttgccgattatgatttacaggttgattacgatccagagcttgaagaacctaagtatcaatttgaacgtcgttagacgataaaaagccccgccaaatcatttagcggggctttttattttgggttaaaaggcgaccagtacgcgcccagttttatgcgtcttttggctaagttctcgggctaaatcagaaaaggcgaccaagttaactgttggccaaatttccggtttaaacgtcgtggcgagtaattgccagagttctttacggtctctgcgcgggtaatagactgaatcaattccggctaaggtaatcccacgtagaataaacggcatcaccgttgtttctagggttgcaccagcggcattgccacaagttgctacgaatccgccggcacaaacttgcggtaagatgtgggctaaaacaggaccgccaagcgtatcaataaccccggtgaatgtctgatggctgagcgctttaagcggaccagcagttaggtcagctgtattaataacatgggtcgcaccaaggtgcaataaataatcggtttgttgcaagtcacgcgtagttgcggttagatttgtgaagccaagctgcgcgaggatggtaagtgcgaaacttccgactccgccagtggcacccgtaattaagagtggggtgtcatgatcggctgtaaaggcttggcgtaataatttgctgagcgcaattgcggcggtgaaaccggccgtcccaaactgcatcgtttcagcaagactaagattttcgggcaacttaaagagccattcactagggactttgacatattcagcgtagcccccagcgattgtaatgccagtttcataacccgtacataacacctgatcgcccgcttcaaagaacggattatccgattcgacaacttcgccagcaaaatcaacgccaggtgtcatggggtagtgacgtaagacgccacttttaggattcatagcgagccggtctttgtagttaatatcagaataggcgactttgactaacaccccgtctttagcgaggtctggcgttaacttagtttgataagtggcactgacagtagtatcggtttgttctaaaacgagtgcttgataggcgaccatatgattacaacctcatttctaaataattatttaacttcattatacaacaatgttcgctttgaattggcattgcgtctcggaaacggtataattaataggatattagtcaactaataacgagtctgagagtgctaaagataaaggggacgaagaagaagatgcaacaaccaatggtggaatttaaaaatgtcattaaagaatacgacgatgtccaaattttaaagggcatcgacattgcgttggaaaaaggtaagttttataccttacttgggccgtctggctgtggtaagacaactattttaagaattatcgccggatttaccaatgcgtctgccggggatgttttatttgaagggcagaagatgaacgatttaccggccaataagcgccaagtcaatacggtttttcaagattatgccttgtttccccatctaaatgtctttgagaatgttgcatttgggttaaatctacgtaaagttaaaaaagcagcgattaaagaaaaagtgattgaagcccttaaattggtgcgccttgccggatatgagaatcgcgaaattagtgagttatcaggtgggcaacaacaacgagtagcgattgcgcgcgctttggccaatgaaccaaaagtcttgctactagatgaacctctatcagcactcgatatgaaattacgaaaagatatgcaatatgaactacgcgatttacaacaacgattagggattacgttcttatttgtaacgcatgatcaagaagaagccttagcgatgagtgatgaaatttttgttatgaacgaagggcgcgtgttgcaaagtgggacacctgtcgacatttatgacgaaccgatcaaccatttcgtagccgattttatcggggaaagtaacattctgccaggtaaaatggttgctgattatcaagttgaaatggtcggcaagcagttcgaatgtgccgatgccgggatgcgggtcaacgaagcagttgaagtggtgcttcgtcctgaagatctagacattgttgccgttgaccaaggccaattagtggtaacggttgatacgcagctatttcgtggtgactattatgaaattacggcctatgatgcggatcaaaaccggtggttgattcattcaactaacccagctaaagatggtcaacgagtcggcttattctttgaaccagaagacgtgcacatcatgcgttttggggaatcagaagaagatttcgatgcacgacttgaaagttacgaagaggaggactaaggcaattgcgtaaaaaacaatggttatattacttaccatatgccctctggctaattttgttcgtcctcgcaccagtcgcattgattgtgtaccagtccttctttgatatcaatgggcatgcgacattggtcaactacacgacctatttccagtcaggcacttacttgaagatgacattaaattcgttatggtacgcctttttaattacgctgattacgctattaatcagttatccgacggcgtattggcttcatcaaacgaaacataaacaactttggctattattaattattttaccgacatggattaacttattactgaaagcttatgcgtttatcgggatttttagtcaagatggtgccattaatcattttttggggtggttcgggattgggccacaacagattttatttacgaatttcagtttcttagtggtggcgacctatattgaaattccgtttatgattttgccgatatttaatagtttagaagaattgaatccatcattggtcaatgcaagtcgtgatcttggcgcaagtaattggcaaacctttacgaaagtcatcttaccgttaacaatggctggggttaaagccgggatacaggccatctttattccatcgttatccttattcatgttgacgcgtctaatcgggggtaaccgcgtgattacgctggggactgcgattgaagaacacttcctcacaacaatgaactggggaatgggctcgaccatcggggtggtcttaatcgtcgccatgggcttaatcatgctggtaaccggggagcaaaaagcaaagaagaaggtgactaacaaatgaaaaaaatgaaatggcaaaacgtttggttagtgcttgtctctgtcttattgtacgcaccgattttctatttgattttctattcatttagcagtggggataatatgaatggcttcaaggcatttacctgggcaaattatcaggccttgtttgaagatactcggatgattgaaattgtgttacaaacgttattaatcgcgattctatcatctttatgtgcgacgattgtggggacgtttggggcgttagggatttattcaacgaagcaacggcgtgtgcgcaatatgattttatcgctgaacaatattttaatggtttcacccgatgtcattatcggggcaagttttttaattttcttcacgttcttaggttttggtttgggctttggttcagttttactgagccatatcgctttttcaattccgattgttgtcttgatggttttgccgaagttaaatgaaatgcggccagcattagttgatgcggcacgtgatttaggtgcgactgactggcaagtcctgagtaaagttattttaccgtacattagttccggcatttttgcaggctttttcatggcgttcacctattcgctagatgattttgccgtgaccttctttgtcactgggaacgggtttgaaacgctctccgttgaaatttactccagagcgcgtcaaggaattagtctagaaatcaacgcattatctgccttgatgtttgtcttctccttaatccttgtggccggctactatttattgaatcaaagaagccaagcccaaaaagcacggcgtaaacggaaagcgggggcttaaaatgaataaattaggacgcatcactttagcgattttagtggtctgtgcagccctttggtttgggacggttgaattacaaaaatcacaaggttatacgaaaaataatacattaacattatataactggggcgattatatcgacccagcacttattaaaaagtttgaaaagcaaactggttatcatgtttcggttgagacgtttgatagcaacgaagcgatgtacacgaagattaagcagggtgggactgcttacgatttagcggtgccaagtgagtacatgattgaaaagatgcgcaaagcacacttacttaaaccgattgatcatcgtcgcttaaccggctatcaaaatattggcaaggattttttgaatcaatcatttgatcctgggaataagtattcattgccttatttctggggcacactcgggattatctacaacgatcaattggttaaaaaaccactgacacattggtcagatctatggtcaccagattatcgcggccaaattatggtagtcgatagtgctcgggatatgatggccgtgggcttgatcgaaaatggccagtcagtcaatagcacgaatccggcggttttaaaggcggctaaggacaagcttgatcagatggcaccaaatgtcaaagcgattgtagctgacgaaattaagatgtatatggttcaaaatgaagcgagtgttgctgtgacttggtccggtgaagctgccgagatgttggataataatccccatttgcactatgtaattccagaagagggcagcaatctatggtttgataatctagtgattcccaagacggcaaaacatgaaaaggcggcctatgccttcttaaactttatgttagagcccaaaaacgcggctcaaaatgctgaatatattggttattcaacgcccaatataccggccaaagcactcttgccagcagcaacacggaataacccaggctattatccaagtcaaaaggtgatcgatcgcttgcgagtttatagtgatttatcaccaactgcggttggccgttataatgatttatttttagagtttaaaatgcaacattaaaagtacaatgagcagattgaaatggttcatggtataatagatacagaatttttttggatggaggttacctatgtcatttgaatggtcacagttattaacgtggcggatgctcgcaaatgtgctagacatcatcgttgtctggtattttgtgtataaattaatcatgttgattcgcggtaccaaagccgtccaattgtttaaaggtattatagtcattgcgctgattaaggttatcagttggtacattggtctacgaactgtttcgtacattatggatcaatttatcagctggattgtgattgcgttgatcgttatttttcaacccgaaattagacgtggtttggaacatatcggacgtggatcgctactacgacgcggcgttaatcccaagattgaacaagaaaataatttaattaaagccctcgataagtcgattcagtatatgtcgaaacggcgtatcggggcgctgattacaattcaaatgaataccggtttggaagattatatcgaaactgggattgatttggatgcggatgtgacgggggagttattaattaacatctttatcccgaatacaccattgcatgatggggcggtcataattcgcgatgataagattgccgttgcggccgcttacctaccactttcagagagtaatttaattcccaaagaattagggaccagacatcgggcagccgttgggattagtgaagtaacggatgctttgacgattgttgtttctgaagaaaccggtggtgtcacattaacgcgcaataacgagttaatgcgtgatttaagccgtgatgattatatgaagtacttcaactcgcatttgattacccaagaggaaaacaaaacgagtctcttacaagaatttgttgatggcttcaaaaaaggaggccagaaatgatgaaaaagtttgttgaaggcccatggctctatcgaattttagcgttatttctagcgttgttactgtttggttatgtcaatttggatgaaattaacacgacgcgccagacgaataacaatgatacacagatgctagcaacccgcacggaaaccgtaaaagtgccgctccagattaatgcagatactggtcggtatttcattaccggctatccacaaaaggtcaaagtgaaattatccgggccgaatgcgctagtcacatcagcagttaacacattaaatttccgcgtgattggcgatttaacgaagctgggtcctggtgatcacaccgtcaagttaaaacagacggggattaataaagatatcaaagtcacgattgaacctaaagaaattaaggtccacattgagcacaaagtgacaaagcaattccctgtgcaggtcaatgttaagaaagaaaacttagcggccgggtatagtctaggaaatccaaaactaagtcaagacgtggttgaagtcagtggtgcaaaatcagcagtgaatgctgtgtcgcaagtagtagccactgttgatcccgatgaaggcaccaaaaaagacatcaatgaagaagtcttgttgcaagctgttgatcgcaatgggaaagcgttaaatgttttaatttcaccacaaaccgttaacgttaagatattggttcaaatgagtaagaaaacactcccgattagtttggaaaagaccggtgaaaaaagtggctacagctacagtctgtcatcaacaactgattcagtgaccgtgtatggtcgtcaaacagctttagccaagttgacgtcgttaccagtgagtgtcgatttatcgtcaatcacgagttcaacttcaaagacggttaaagtggctttaccagacaacatttatgagagtacgccaagtgccattaaggtgacaattacggtgactccagatacgaccaatacgagtgctactaatactgttgaagcgccgtctgaaagtacggcacaaacatcaagtagtgcgctcgttgagtcaagttcaagtaacagccaatcaagtagtcaatcaagctcaagtgaaagtagtaaagcaaataccgatgtaaatcaataatcaacgctaaagattttagcaggatgaatggagataattaaatatgacaaagtattttggaactgatggtgtccgtggcgttgccaacttagaattaagcccagaaatggcttttaaattaggacgtgcgggtggttacgttttgaccaagcacgctgataaggatcaacggccaaaggttttggtggctcgtgacacacgtatttcaggccaaatgttagaacaatctttgatttccggcttattatcagttgggattgaagtcttatcattaggcgtggtgacaacacctgcggttgcctatttaattaaggttcaagaagcaagtgccggcattatgatttcagcctcacataaccccgctatctataatgggattaaattcttcggcgcagatggttacaaattaccagacgcaactgaagaagaaattgaagcaattattgatgccgaagaagatactttaccacgtccagaaggcgctggtctggggacggtggaagaatatccagaaggtgctttgaagtatacccaattcttagaacacacgattcctgatgatttagctgggattaaagtggcattggatggcgcaaacggttcaaccagtggtttaattagccgcgtatttgctgatctagaaacagaatttacaacaacggcaacccatccagatggtttgaatatcaacgatggtgtcggttcaacacacccagaaaatgttgctaaaagagtgcttgaaacaggcgcacaagttggactagcatttgatggtgacggggatcggtgtatcgcagttgacgaattaggtaatattattgatggggacaagattatgttcattctcggtcaatatttatctgataagggtcgtttaaaacaagatacgattgtcacaactgttatgagtaatatcggcttgtataaagcgattgaagccaacaacatgcaatcagtccaaacagacgttggggatcgtcacgtcgttgaagaaatgcgtgaaaaaggctataaccttggtggcgaacaatcaggacacatcatcatctttgattaccacaatacaggtgatgggatgttaaccgggattcaactcttaaacgtcatgaaacaaactggtaagaagttatctgaattagcagcccctgttcaaacttacccacaaaaactcgttaacttaacagttaaggacaaggatgcttggttaacaaatgacaagatccaagctgccattgataccgttgaaaaagaaatgaatggtgatggccgcgtcttggttcgtccaagtgggacagaaccattgctacgagtaatgtgtgaagctgcaacagaagaaaaagtaaatcaatatgctgatcaaatcgcagcggttgttaaagctgaaattggtgcataattaaagggagtgctgacgcgagttggttaggctttgaggattaacagtaaaatgggggttatggtgtttcttgccataatccccattttgcagttcaccggaaatgactactcgagaagcgcgttcaagttggtcaacttttgagcactagcttgaaaagcacgttctcacttgaatcaaactaaaaaagcccgtcaacattgtgttgacgggtttttttggtgcaattttatttaagagcccattcttctaacgcaatgtgacttgttcgtacatcagaaaaccaaagacaaccaataagacaacagcagcggatatcagataccattctttgacaagtatgataggtgcatcagtcaaatgataatttttgcggtaacgtttgagattgaaaacactgacttcattcacgatgattaataaagcgggttctaatagtagcatgtatttactaccggttgaatcgacaatgttattggcggcaatatgtaaggcgattgttttaggtgcaacgacgataaagctcagtccgactaataggccaagaagagaaatacttcgaattaacaagatgctctttttcattacagaaactccttttctaaaattgactggtcttagtatagcataaaagcgctagatagcggaaaatatttggactataccaaaattataaatttatatataccaataaaaatgttgacattaaaatcgttggtgctattatatttaagtgttgtaccaattgattaaagaatattaaaccaaagttgaaaagaggatttttataatgtgtggaatcgtaggcgtaattggcaatgaaaagacaactgaaattttattaaacggattagagaagttggcgtatcgtggttacgattcagcgggcatttacgtgaacagcgaaactgggcaggactacttagttaaagaacccggtaaaattagcgttctagaagcagcggttgggcctgaagtacaaggaacaatcggtgttggtcatacgcgttgggcaacgcatggtgttgcgagtcgtgataatgcgcatccgcatgtttctgaagatggtcgtttttacttggttcacaacggcgtgttaactaactatttagctttaaaagaaacatacttggaggatgtccattttgtcagtcaaaccgatacggaagtcgctgttcagttgattgcttaccttgctaagacagaacaattatcagctaaggaagccttccggaaggctttaacgttgattgaaggctcatacgcatttgtcatggtcgatcgtgatgatcctgacaccttatacgttgctaagaataaatcgccattgttaatcggtgtaggtgatggctttaacgttgtgtgctcggatgcattagcgatgttgaatgaaacaaaagattttattgaaatccatgatcgtgaaatggtgacactcacgaaacaaagtgttcaaattgaagatttagacggcacttttattcaccgcgaaagctatcatgttgaaatggatgctgatgcagtgggcaagggcacatacccacactacatgttaaaagaaatcgacgaacaaccagctgttatgcggcgtttattgaacgaatacgttgctgttgatggagagcttaaaatcgactcagcgttactcagtgcaatgaatgatgcagatcgcctctacatcgtggcggctgggacaagttatcatgccggtttaatcgggaagaccttgtttgaaacattaacgcacaagcctgtcgaagtacatgttgctagtgaattcggctatcacatgccgctattatctgaaaagccattctttatctttttaacacaaagtggcgaaactgctgatagtcgccaagtgttggtacaaactaatgccttgcattatccaagcttgaccatcactaacagccaagggtcaacactttcacgggaagctgattacacattattattgcatgcaggcccagaaattgcggttgcttcaacgaaagcctacactgcacaaattgcagttgaattattcttggctgttgcgcttggacgccacaatcaactggtgctagcagaacaattcgatgtacatcatgaattaggcttagtcgctactggcatggaagctttattgagcgaaaaagaacagattgaaaccttgacgactgattacttacaaacaacacgcaataccttttatattggtcgtggtgaagattacgccttgagtttagaagctgctttgaagttaaaagaaatttcatacatccaagctgaaggatttgcagccggcgaattaaaacatggcaccatcgctttgattgaagaggggacacccgttattgcattcttgatggatgccaaaacgattgcgcacacgcgtggtaacttacaagaagtgactgcgcgtggggcaaaagccttgacgattgtcagcgaagaatctgctgaagcagatgatcagatcattttaccaaccgtaaacgacttattgacaccattattggggatcattcctggtcaattaattgcttactatgcaagtttgcatagagggtatgatgtagatcagccaagaaacctagctaagagtgtcacggttgaataaataatattcaaaaagcctcgttcaaagaacgaggctttttttgcgtttaatgagttggtgcatatgttgctcgaggaccgccaacgtattttggtcgtgaccgtaaagctgtgacatgtgcactacccaatgtatcaagggttgggcggacagggacttgaacgaatttcacgtgcatcccaatcgccgtatcaccgatatctaatccagcttgtgcaacgatatgttcaacttcaaccggatcactgaattgttcaaatgcagcgacggagcaggcgcctccagcgtgcatagcaggaacaactgagacaatttcaaagtcgtgtgcgcgggcaacctgacgttcaatcaccaaactacggttaatatgttcacagccttgcacggctaaatgaatccccaatggattgagaatgccacgaagtgttgcgatgatgacttcaccgacttctttgctagaagccttaccgatatgaccaccgacgacttcactcgttgaacacccgaggacgaacaaatcaccatttcctaagtgtgcttcgtttagaacatcctgagtcatctttgttaagtcttgttgaatttggtttaattgtaattcgtttgtcatttaaaaaatctcctagtggttaaataattgtggtcgaatacgggataaactagtgactaacgggatggtaaccacgataccaagtccattttgaacaatattactgaaaatcgaagcgattccggcagcccagccgaaaagtaaactggtagctaaaaagtaaccggcaaccatgacgatactaccgcaaatgagggggataatcagctgctttggtcgcattgaatcattacgagtcaggtgacctacaacgaagccttgccccccatgaatgatgagtgagaagagacaccactcagggtaaccagataatagatcgattaataggccactcagggctccgacagtgagtccgccaggatttcgcagcatgatcgccgttgtataaataccgacctcacagagcgtcacaaagcccttcgtcgccggaatcgggatgatgattaacaaagagagtgccacggtcaatgcggtgagcatcgcgagtaatggtaattgacgtttattaaagtgcatgtttagtagccccctgccagacattccccaggccatggcgtagatgaataccatcttttaaaccggcataaacaaatttctttgcgcgtgccacggcaacttcaatcgattttccttgtgctaattccgccgcaatcgctgccgaaagcgtacaaccggcgccatcaatggtagttgtttccaatcgtggagcttctaaataatgagttgttgcgcccgattttaataaatcaacggcctgctcaccagggaatcgttgaccacctttgataatgacgtgcttggggccaaatgattggataattgtagcagcttcgaccatttcctcacgcgtggtaattgacgaaagaccactgagttgttgggcttccaacaagtttggggtgacaacgctcgtcaaaggcagtagttctttttttaacgtgtcgaggtacgcttgctgcgcaagaatggcgccttctttaaagacgaggaccgggtcagcgatgatggttaattcaggatgctgtcgtagtcgctcacagatggcttttaaagtttccgtttgatgaaccaaaccaattttaacgtgcgttagtggcacgtagtttaaaatggcatcaagctggtccaaaatggtatcctcaggtaagttgtggattttcaagtgaccgtctggtagcaatgtagcgatgcaagttaaggcactgaccccaaacgtttctaaggcttcgaacgtttttaaatcggcctggatgccaccaccacccagagtatcagagccggcaatggttagaatgttttgcatagttgtcctccaaaattctattcttgactatcatagagaagaatagaatgttcaacaacagccaattggcttgtttttttaccatccaatttgtaaactaaataagaggtgttaaaaatgattgaatggttacaatatttacctgaacaaaagccaaagtatatggcaattaaaaaaatgattattagcttgatagataaaggacaattaagttcaggtgaccaattaccgccagagcgtcagttagctaaattattgagtgtcaatcgttcaacggtgacacgtgcgtctgatgaattggttgcagatggcgtgattgaacgtcgcgttggtagcgggacgtttgtcagccagcaagcgcgaccacaggcaaggcgggtcaattggcatacttatttgatcagccaacgtcagtcacaaagtcaaaatgaacggcgccaattacaacaactgattagacgaaaacctgaaaagttaattgatgtttattcaagtgacttaccattagaattagtcccacaatttcaatttcctgcattgacgtggcaagattttattactgcacaagcattagagacaccacgaggctatcaaccacttattacggcaattaatcaattggatcaacacaataaacggctattttttaccgaagagcagttattaatgactgccggtgtgcaacaatcactctttttaatattacagggtttattgacgccaggtgatgctgttgcaattgaatcaccctccttttttcatgactcaactttgtttgaagcgacgggtgtccgtgtctatgaagcttcagttgatgctgatgggatttatttgactgatttagaagagctaatcattaagcaccgtgttaagttggttattctcaatccagattatcaaaatccaacggggcacgtaatgagttttcaaaaaagaaaagcagttgttcatttatgccagatgcatcaaataccaatcgtagaagatgatgtctttggttggttaggatttgatacaactaggccaatcccaacgttaaagcaacttgatccggataatgttatttatattagttcgttgtccaaaattatgggggctagtagccgaatcgggtgggtagctgctactccgcaagtcatcgaacagttgacccgcgtgcaacatgaaatggatttagtgccaagcattatggcgcaagtcatggtgaccttagcgatgggggatccgcaatttcaaacgcagttggatcaacttaaggggacgcttcaagaacgtgcacaagcaacctataagatgcttgaaagggtattacccgattggcacgtttacttaccagcgggaggttattatatttgggtgacccatccgaaccataaattacgcttaaaaacctttattgatcatcagcttgctgtcgcaccaggatcattatttgggcttaaaacagatgcgttgcgcatcaattttgcgcgattaaatgcaattgatttggtcgcgctagaacaacgattagtagccattattaaagcaacagaataaagagggggattcggatgacagagcaattcgtaccagagatttatacaccattaaaaaccagtgttgtcggaccacctgctgtggcgcgacaagttggggggattaagatcctcggtaagaagattaaaacaattatttttaccaccgatgttgcgattgtgaataatacaaatgctgacgctgttttggcagtttatccatttacaccacacccagctgtcatgaatgccatcagcaatgtggcgacgatccccgtttttaatgggattggtgggggcttaacggccggcagccggtccgcgtacatgggattattggcagaggccgccggttcgattggcgtggtggttaacgcaccgacctcggtggagacgattaaaatgattaaccgcgttgttgacgttccgattatttgtactgttgtgtcagaacgacaggattatgccgcgcagattgaagctggagtttcaattttaaacgttagtggcgcggctaaaaccccagcaattgttagtgcaattcgccaacaatatcccgaaattccgattatggcaactgggggtaaaaacgaagctagtatattagcgacgattgaagcgggtgcgaatgcattgacgtacacgccaccgaccaatggtgagttatttgctaagaaaatggccgattaccgatctgatttagtatgataacagttgacgtgctatgcaatcccccgtatgataaaaagattactagaggaggtttttgaatgattcgtcaagcaacagttgcagatgacaagagtgtcttgccaattattaatgttgtttttgaagaaatggaaatgccactcttccaaaagattccgctagaggatttgtttagcattttagaacaggcctttgcaatgcctgaatatcggtatagttatgctaacacactagtttatgaagaggatggtcagattttgggcatacttgttagctttcctgaggaaaaagaggctcatattgatgatgcccttgcaccgttgtttccacaaattggcttacctgaaacaacgcgtttctttaatgataaggaggcacagccaggtgaatggcatattgatacaattgccgttgttccacaagcacgtggtaagggtgtcggatctaagctattggcagcatgtgaatcagttgccaaggctaatcacaaacagattattagtttaaatgtagattttaataatccaggtgccaaaaaattatacgaaaaaatgggttatcaagtcgttggggaattgatgattggtaatcatcaatatgaacatatgatccgtaaaataggctaatccaataccgtggtataatgggagtagtgatcaactattttggagaggtcgtaggatagtatggataggcgaaaaggcttattggctgaactcaatcaatatgtctatagagcgattataagtgcagtggggatgtcgatttatgttttagcggattctttcttcgtcgctaaaggaattggtgttctgggggtcaccgttatgaacttaacgatgccgctttttaacttgatggaaggtttaggattactacttggaatgggtggcgcgacaatttttaccatctataaaattagcaatccaaagattgccaatcgtgtctttacgcaaatgttttatattgggctattattgggcgcttttttctcgatgtgcggactactttttgcgtcgaaaataactgggatattgggagcagatggagagacttggcaacatacattaagttatgtcagaatcatactaatttgtggtcctttttttgtatttaataatttaatattatcgttcgttcggaatgatcgggggaccatgatagccatggtagcgatgattatctctagcttgactaatattttactcgattggctattaatacttgttttaaaattaggaatggtcggtgcgggactagcaacaagtttatctccaatgattagtattttgattattcttagtcacttttttaggcaagataatcatttaacaatcggctggtatggatttgattttaaaattattagtagtgcaattcaaattggcttaccctcgtttttaacagagatgagcaatgggattggtatttttgtatttaacttggttatcttgcatattagtggcaatatgggtgttgcagcatacgggattgctactaatattttattagtggtgcttgccatttttacgggtgttgctcagggaatccaaccacttgtaagtcgctcctattcagagcatgcattaccaaaaattaagtttgtattgaaatatggcgtagcttgcgcattagtgattgggatagttgcatactttattgtcttccaatttggcgcgcagattattggcgtatttaatacggaaaataatgcgcaagtgattaaaattgccagtgacgggatgccaatctatttcttaagtatctttttctcggggataaacgtggttttgaatatattctttgcatcaattaataagacacgcatttcacttgcattagtttttgtacgtggctatctattagtagcagttgtattaacaatcagtgcgctttgcttcggaatgagcggtgtctgggcaagtttaccaataattgaactaatttcagtgggtcttgctattatgtcttatttccgagtggaaatagaattgaagaatggtattttcgagattggctgactgaatgaattaaaatagcatgaattattttagaaagcaactaatgaaaatagctggtttaaaatgaaaataaaaaaatataaaagtttaataaatgtataaaaataatatatttattaaactttttattttttctcctttttcttagagagttaatgtccggaatggcggctattagataaaaataatggtagtgtaagttattgacagtaagcattcattttaatatgtatacatcgcgaaaatagaaagcgctcacaaaacgcccttgcagtacttttacattagtgttaaaacataagtgttagttatttaacaaagtagagatttgggagggtacagacatgacaaaaatgaaaattgctgtttccgctgatttaaaccaatttttttcaacggatcggcaaaccgtattagttgagaataccgattttgtggatgtcgcagctgttgttttatcagatactgatttgcaatatgtaacaactgttgatgatacaaaatttgatatcccaatttttattgttactgataacagttcaacaatcggaaaggatgtaatggcaaaaattttccatatcattgatacgaaaaatgaatacgattacagacttgctaatagagaaattgaagctgctgctactaaatatgaagaaggtgttttaccacctttctttaaagaattaacagcatatgttgatcgtggcaacattcaatttgattgtccaggacatcaaggtggtcaatatttccgtaaacatccagccggaagacagttatacgacttctttggcgaaaatatttttagagcggacatttgtaatgcggatgttgatttgggtgacttattaatccatgaagggcccgcaatggatgcacaaaaacatgctgccaaagtatttaatgcagacaagacatattttgtaatgaacgggacaacaacttcaaataatattgcgatcacttctgcaattgcgcccggtgatttagtattatttgaccgaaataatcacaaatcaatctataatgcagccttagttaaagatggtgggcgtccagtttatcttgaaacatcacgtgatccttatggctttattggtggtatttacgctaaagatttcgatgaagactacattcgccaacaaatcgctaaagttgatcctgaaaaagctaaagctaaacgaccattccgtttagctgttattcaattaggaacttatgatggaacaatttataatgcaaaacaagttgttgaaaagattggtcatctttgtgactatatcctctttgactcagcttgggttggttatgaacaatttattccaatgatgcgtgattcatcaccattattactagacttaggacctgaagatccaggtatcttagtaacacaatcaacacataaacaacaagcgggattttcacaagcatcacaaattcataaaaaagattcacatatcaagggtcaaaagagatatatcaaccacaaacgcttcaataatgcttacatgcaatatgcgtcaacttcaccattctatccattgtttgcaacattggatgttaatgcgaagatgcaagatggcgaagctggtaagcgattatggcatgatgctttggttgtttccgttaacgcgcggaagagtttgttaaagaatgcatcgatgattaaacctttcttaccaccaatggtaaacggtaagaaatgggaagatgctgatactgaagaaatcgtcaataatatcgactactggcgttttgaaaaaggtgcaaaatggcatgcatttgatggctatgaaaataatcaatatttcattgatccaaacaaatttatgttaacaacaccagggattgatgttgaaaccggtgaatacgaagattttggtattcctgcaaccattcttgccaattatttacgtgaacatggtattattcctgaaaagaatgatttaaactcaattctattcttgatgacacctgctgaaacatcagctaagatggataatttagtttcacaaattattaagtttgaagccctagttaaagcagatgcaccattaaaagatgtattaccttcgttatatgaagcacataaagaaagatataatggttatacaatccgtcaattgtgtcaagaattgcatgatttctataaagaaaataatgcaaaggactatcagaagaagatgttcttagcagaacacttcccagaacaagcaatgaaaccatatgatgcaaacgttgaattattgcggaataacgctaagttagtcgcattaaaggacattcagggagaaattgcacttgaaggggcacttccttacccaccaggtattttctgtgttgttcctggtgaaagatggtcagaagtagctcaaaaatacttcttgattcttgaagaagggattaacaagttccctggatttgcaccagaaatacaaggtgtctattttgaagatattgatggttatactactgcatttggttatgtattagataaataatgatcaaacaaactttaaacgtagtgcacattctgatgtacactacgtttatttttatgatgaggtgagttaaatggcaaaagatgggaaaaaaatgagtgttatacagttaacaattatcactgccatcaatatgatgggttctgggataattatgttgccaactaatttagcgcaagtcgggacaatgtctattttatcttgggtggtaacagcaacaggggcgatgtgcttggcatacgccttttcacgggctggtatgtacactaagaaatcaggtggtatgggcggttatgctgaatactcatatggtaaagccggttcattcatggcaaactacacatatggtgtttcgttagtaattgcgaatgctgccattgcaatttcagctgttggttacgctgcagtgttgttccattggcatttgagcccagttgaggtagcgattggaacaattattacactctggttagcaactgtacttaactttggtggtgctaaaattactggtaagattagttcatttacagtctggggtgttattattccagttgttgtgatttcaattggtggttggttcttctttagtggcacaatgtacgctaatgcttggaatccacatcatttaagtttctttaatgggattagtaaatcaatttcaattacattatgggcgttcttaggattggaatccgcatcagctaatatggattctgttgaaaatcctaagaaaaatgttccaattgccgttttaggtgggacaattggtgctgcaattatgtatattatttcaacaaacatcatgcaagggattgtaccaaacagtgttttggcagcatcaaatgcgccatttggggttgcatttagtcaaatgtttaacccaacaattgggagtattgtacttgccttaatggttatttcttgttttggttcattactaggttggcaatttacgattgccgaagtgttccgcagttcagctgttgaaggctatttccctaaagtatttggaaaagtagttggtaatggcacaccaatcgttgggatggtcattattacaactttacaatctttattatcattaatgacgattagtccatcactttcaaaacaatttacggtattggtaaacttagcggttgttacgaatgttattccatatcttctctcgatgggagcattaaagacaatgcaattagatgccaaagtatcacctaaatcgatgaagataacaaatgcaattgcaatggttgctgctatttatagcttgtacgcattgtatgcggttggcttcagagaacttgcatatggttcattagtaacatttgcaggttggattttatacggaattgtttcacatcgctttgatttgaaacctgaaggtcaaaaatagtggtagtgattaattaattattcagtttaatcaatttaatcaattaaaaaagacgatcatgaagtgaacccccgatattggaccaaaatccaatatcgggggtttttatattgaccaaatattctaaaacattaggactttttgtcttaacgctgttttttttgtgactttaaggggccttttttaattcgcattttaagcaagtttcgcgaccacttgtccactcactaatctgaaacgtccttaaaatgcgcctctggtgattgatcgtttataaacgtgattagaccgtgatttagccatcaatagcctttaatgtgtttgagcgcattcctttggtagaaagaatgcgctcggaatccctttaaatcaacgataatcaaaggtgcaaaataccaccgcatggtttataatgatatagagaaaaagaatgcggtcaaaaaggcggaaaaaacatgcggaaatcgcgcactaaaaaaggcaaaaaattaaatgttcaacctttacggacaaaagatgagattgaagacatgaaagtcatcttgcgccattcacaaatgggtagtcgcaattatttattatttttactcggcattaatactggcttacgctgttctgatattgtgcagttaaaagtcaaagatgtgatcgaagacaatcccgtgattgttgaacaaaaaacgggtaagtggcgccaaattagtttggcgagtttacgcccatacatcagtccctatattcaaaataatgaattgctaggcaatgattggttgtttcctagccgcgtcggcgataaccacatcaccgtcaacggtgtttaccgcatgttgactgaagcaggtaagaaacttgggcgtaatgatattggcacccatacgatgcgcaaaacttacggctactggttctacaaacaattcggggacgtgcggtcattgatgattgattttggtcattcaacgcaagaaacgacgctccattatattgggattacccaagacgaagtgttaagcaagaaacaacaactggcgattggactttaaaaaaagcttgcattaaagtgaggtctaaggtgtatagtaaagacaatataataggaagagataggagattatagttatgaaaacagctacttttatgggtcctggtcaaatgaccattaccgaagcaccaaaaccaacgattgaaaaaccaaccgatgcggtcgtgcgcattatccgcgcgtgcgtctgtggttctgatttatggtggtatcgtgggatttcaaaacgagaagtaggcggtttcaccggtcacgaagcaattggcatcattgatgctgttgggactgacgtacaaaatgttagtgtcggtgattttgtgatcgtgccatttacccatggttgtggccactgtgccgcttgtttaaacggttttgatggcgattgtaccaaccgcgagaataatcctggtggctaccaagccgaatatctccgttatcacaatgcaaactggggcctcgttaaagttcctggccaaccaagcgattactctgatgaaatgctgaataatctattgacgctttcagacgtcatggcaaccggctatcacgctgccgtgtccgctgaagtgaaacccggtgacacagtcgttgtcatgggtgatggcgccgttggtttatgtggtgtgattggcgccaaattactcggtgcgaaacggattatcgcgatgagtcgtcatgcggaccggcaaaaattagcccttgaattcggcgcaacagacattgttgctgaacgcggtgacgaaggggtcgcaaaagtgatggcgttaaccgacaacgctggggccaacgccgtcttagaatgtgtcgggaccgaacaatccgtcgccactgccgtcgccgttgctggcgcaggggctgtcattggtcgtgtcggcattccccaaaaagcagagatgaacaccaatgccttattccggaagaacatcggtttgcgtgggggaattgctgccgtaacgactcatgatcgcactcgtttattggatgctgttttaaagggtgccattaatcctggtaaagtctttacacaacgctttaccttagatgatattcaagccgcttatgaagcaatggatcaacgcaaagcgattaaatcattattaatcatcgctgaataatataaaaagtgccgcagaacaggaaaaatcctgattctgtggcacttttttaatgcgcaataagacttaatagataaccgccaagacagccgaagatcagactgagcaaactcccaatgaggtaatattcggcgaagtggtgttcgttggattcaatggctttaaagcgggtcagcgccttaatcgccacaatcacagcaatactcgcaacattgtgcgtgtaaaacaagattaagatggcaaaccgttctaaatgaccaatatgccgacccagttttgcaccatctggcaggcgatccatgtttaaatccagtccttttaaatagaagctaatgaaataatcggcaaataataacgtgctcaaaacaatactggcagccaataacaatcggttcacatggttaaacgcccattgctggccgaggaacatgctcacaagaccgatcactattaaatggagtgcttgatcgatggtataactcatcactggtacgcgattgctggttaaatgtagctgtgcttttaaaagtggctggctattttgcttaaatagatcaatgagccaatgactcatcacaatgatgactaagccgattagtaacggttgccaatgtggccaagtaggtggtgccattaaccaaccgccaccccataaaataagcactaacgggacttgtgtcagtgcgtgcttgcataatggccaccatttcacaccgagtttcgttgatcgtttgcattgagccatctgatcagattgaaagacaaagtcgcagccaatatgactaagcaagaaaagcgcaaagaggttcattcgactgcctccttaaaggtcatcagttgcgcgcgcaacgttgccagggtctgttcaatcaagggatactgaatctgattcagtaagcgactgactttactagaggctaatgcacgccctttttgatcactgtagtctagttcataggaagcaacgccgtatttggtccacaacaattccgctaattcatagcgtttcaatgttggttgaagcacgatttcagcaaaagcgtccttgcgcaactgcgtattcaagagttgctcataaattaaataaaagagggcattaatcccatttgcggctggttgatctgccactaattgaaattgaaaggccgtcgtcataaagggataaccttgtgctaattcagcaccttgacgcaacagtttggcttgatctgctgcggcgagggcgttcacaattgctgtcccgttgacccgattgatatcctgatagtcacttggactcggcgtagtcatcgttcctaagccaaccccaaaataaaaagtgggctccgccagccccgcaaaatgtgtctgccagaaagtttgaaaagcgtcactctttaaataggcattacaaaagggatagacatcaacaatctgtgcctggtcatccgctgaaaaaccgcccaatagaccatcaccatccttaattgcaaatggtgttaataacgctggaaaatggtgattcaacgtgtcggcgaagtgttgcaataactggagtgtctgtgcttgttccgtaaaacgggtgcggctatccgctaaatcaatgaaacaataggctgtctgcatcgttctcatcctctctgaaaacatttgattataagtacataataggtgaatatgaacgaataatcaaatgtttttgaggagcggtttacatttcgcagcctacgtattatagttaactacataagtaactaaccaattaacgaaacggaggtgttccggatgctttttgaatttaataatgatacaccactctaccggcagattgccgaacaaattgaagagggtatttttactggggtctttccacctggtagtcaagtcccatcgacaactgaaatttccagacaattcaatatcaatccagccactgtactcaaagggatgaatcaactcgttaccagcggcttaatcgaaaagaaaaggggactcggcatgttcgtcacatcaagcgcacccgcacagatcactgaaaaacggcaatctgaattttttgaacactatgttgcccaatttatcactgaagcacaacaattaaatctaaccaaagacgacctaattgcactgattgaaaggggttatgaccatgcctaatttacaaaccacacaactgattaaacaatttgggaaacaggtcgtcctcgacgacatcaacttaacacttaaacccaatacaatttacggcttactcggccgcaatggggtgggtaagagtaccttattaagtattctagccaatcatcaaactgcatccctaggtgagattaaatggggcgatacggtcttaaccggtcgcgatcatccgttacaaacgatttacttgatgtcggaaatcaatctctttaataaagatgacaaattgcggaccattattaaaaataccgccttactgcaaggttcatttgatcatgcactcgccaaagaaatgctgactgcatttgatttgaatccaaaaaagaaactcaatcagctttcaactgggtaccgcacgatttttaaaacaattgttgcgctttgtgtgccggcggaatatgttttcctcgatgaaccagtcttaggcttagatgctaactaccgcagcctcttataccgctacattttacaggcctatgaaagtcggccacggacatttgtcgttgcgacccatatcatcgaagaaatcgcgaccttagtcgaacacgtcttggtcttgaacgacgctcaattaattgtcgatgatgatttggaaaccgtcctcgccaagagttaccgtgtcagtggcccggaagaacttgttcgcgagtactgtaccgacttaaacgtcttagattcccagcaaatggggaccttatacacggtttatctttatgacgtcttaccagaagaacgggttattccagatcgtctaacgattgaccatatcgatctacaagaaactttcattaaattaacgaacaaaggaagtgaagcacatgtttaatgcaatgatgcggtaccgcctagcagcgatttggcgcggcttattaatggcaattgccgtcttcgtcatcatcacaggcggttccattttaatcttctccaaccaaatgacctggaaggccttttggttcacgctcttgagcggttccttagtcgtcagccaactcgttctgattttcctttcgtttgcgacaacccgcaagccgtttaattttgggattctaaatggcattccgcgcagtattagttataccacccaagtgattagcctcttcagcagtcaattgattagtttcctagcactctacggcggcacatacttcattgctgcccaccaaagtgggattaatcgcttctttcttgatagccgtttcgtcctgctggccattgtactcatctggaccatcatggcagaagggattgccattagcagtttcattacgttatttgaacgtaaagcttggcttttcttatttgctgcatggctaattctgtcgacactctatcaacactacattgaaccagcgattgaacgcatgttaccaagctgggtggatacttttgtcctgaacattcctggtgatcaaccaatgaaccaactcgcaaatctattccaccaaccgattttctggattagtggggtaataggcatcctcatcccattagttattgctggtatttgtcaacacttcatgcaaaccagacgcatgacgattcgttttaaacgatttgcacgttaacctaaaagagctactaccaagattattttggtagtagctctttttagctagttactattgtgctaataattcaactaattctgtttttggaatccctgtgaagtaggacgtggtgtcgattggttcgagagtgcttgctaaatgttcacggtcataaaccgtgccgactaacttttcagccaattcgttggcatcgccggaaccgaagaagtcgccgtagaacttgacgttggcaatcttcccattttcgattaacaagcgcgcatcaatcgtcccgaaatcgaagtgtttgcgtttttgaatcgttgatttaggtgacttgccatagacccagtcccaattgctatagagatcgttaaaaatcttatcgatggcttgttcgtctgcggccgttaattgatattcgcggtcggcaatatcagctagttgatcggcgtgcatcaagttcagtaataagacgtctctgaactcttctgtcgacatgttttggtattcagggtcaacgtgcccttttaggtttgtgacgcgttgtcgaatcgatttaatgccttttgacacaatcttatctgcagggacattcaaggcttgggtcaaaacatctaaatcaacatcccatgaaagggtgccgtgggagaaggttttaccattcttggtgtacatcgcgttccctgagaattttttaccgtccactaacatatcattgcgaccagaaacttcagccgttgtggcgcccatttgatggagtgcatcgacgattggttgcgtgaaggatttgaaatcaccgaattgttcagaatctgcgttcaccacgaaactgaaacaaaggttaccgagatcttgataaatcccaccgccaccagacaaccggcgtgtgactgtaatatcatggtcttccacgtatttttgattgatttcttcatacgtattttggttgcggcccacgataatgcatggtttctcaatgtagaatagtaagagtggttcatcgaaatttttttgattcattaaatattgttcggttgccaagtttcggcgaatatcatttgacttcatcacaacgtaatacatcagcataaaacccctttcataatcactacggatttattatactacatatcgcatcaaccagtgtactgaagcattaaaaaagcggtccccgataaaagggggccgcaggattaatcatcgctatattctaaaatatcaccaggttggcagtctaatacgcgacataacttctcgagcgtcgaaaagcgaattgctttggctttaccggtttttaaattcgaaaggttcgcaatcgtaatatcgacctgttcagcaagcgccgtgacactcattttccgttgagcgagaattacgtctaaattcacacgaatggccattgaattcctccttagaccgttaaatcgacttcagattgaaaggcgattgcacttttaaaaagatcttcaacaatctgcatcaaaatgaggattgcaaacggaatgaagaccaggcctaaccccagcaacatcaagcctggtgcatcttcgagttgcgtaatccggtagaaaaagggtagggcaaaaagggccgtcaaactcgcaaccaaaatcgcttttctaattgctgatacatatcgtagcgtctgagggagaaaaacttgatggtgctcaattaagcggagaatctgcgccaacttgattaatgcaaaccaaatactagccgtcacaccatacgcagcaatcgccaacatccagattgtcgctgggtattctaagtgtttcgtggtcacaatttggatcgtcactaacaaacttaacagaccaaataccgccgcaattccgagtaatgccattctaagtagccatttttttaacattcatctgatacctcgtttttaagaatagttttattataatcgttttttattgaaaaacaattaatttttatcgtttttcgataaaacttaatatttaagactagtcaaagtaggcgtaactgttataattatagggggtaaactaaactgtgaaggactgatcttatgaaaatcaggcatctctggctaacattgacgctgaccgttgcattattgggactaacagcctgtcagaaccatcctgcaaaaacaacgacgcctcagcatagttcgcagaaaaaaacggtgcgtccacaaaaccaacagacttacgacaaaaaagatgtccaagcctattggctgtcttaccggcataaaacctttttcgtcattgcgcatcaaccgaatgaacaactgaatacgaaaaataagctcaaaacgtttttgagtcaaacaactacgcaaacactagcgcacgattcctatcaaaaactggacgaagacggcttcatttttattgccgataatcagtttaaaccacaccaagactttggctatgggatggtcacagtgggcattccacgcgacttcacactacaagccattgttgccacagccaatctaaacgacccgctctacaatcgctatccaatttatcaaattcaatgatcagggagaaaacaatcactatgaaaaaaataatgccagtctttattttattactatctatcacaatgttttttatgactggttgcaatcgttccattgaaacacatacaccatccaaaacacagactaaaaaagggactagtttacctaaacatggaacaatcagattaacaactacgactcattcgaatcaaaagaaagtctctggttatatttatcgcgtcggtaacgattatttagtgctaaactctgtaaaagggttcatcaaggatgccactgctatgaaacactatcttgaaggtggcaaagaacaaactacaaatacgtattttgaccagccaaatgtgtttgcaatcgctaaagatcaagtaggtaagcatgctaagctgtttaaacttgcgtacggcacgatcacttacgaagagcttcctgaaaatgatcgcgcgtatgtctctttcgctatcattacagacaagaatattgatgaattacccaaaatcaagattgatcaaatcgactaccaagtaatttaaactaaaatagcgcgtctcactatcttacaagtgcggcgcgctattttattctagtcacgccgttgatacgccatgactgtcagtggcataaacaccagaataatcacagcgccactgacgaggaccattgttgcggttccgctccaatgaccggtgttcaaaattcctctgattgccgtaatggttgtggtgacaggattaatgcggacaatggtttgtagaaaatgcggtaaggttttaactggaataaaggcgttcgataagaaggtcaataccagaatgatgatcatcgataaactactaatcagttcgacatttttaaccagtaaaccgactaaggcgaaaatccacgacgttgaccagccaataaagacagctaggaataacgccatcatgagtgcgccaaaattagcggtagggcgccagcacatcactgacattatcaggattatgcaaggtcttcagtaaattccgatgggttaacgttaagctattgcgcaacacttgcgtatttgttttcatttgtagcatgttattatctccttagtttttaccaacggtcattttcaaaaagacgtcatctaacgatggggctgtcaattgtaaatcgctgatggtgatgcctgccagctgacattgatttaaaatcgcggtgatgacgcccatatcatcgtgcactaacggtccaatgattgtttgatccgtcacacgcacgggctgttgcaaaacggtctcgcaaatcgtctgagcctgggtaacttgttgttgattggcaaccgtcagctgcaactgctgaccaccgacttgcgctttcagctcactaggtgtcccactggcaatcaattggccatgatcaatcaacgcaatccgatccgcatattgatccgcttcctctaagtattgggttgtcaaaaagattgtcgagccatccgcgactaatttttgaatcgcatgccacatttgcgtccgggttcttggatccagtccagtggtgggttcatcgagaaagaggatccttggcttgccaactaagctgaccgctaagtccaaccgtcgccgcatcccacctgaaaaagtcgccaatgtttgatccgctgattggtccaaatcaaagtccgtcagtaactcgttagctcgggttcgactcgctttggcactgagcccatttaaccgcccaaataagcggagattctcgcgcgcacttaagtcttgatcgattgccgctgtttgattggtgacactaaactgttggcgcacttggcggctttgtgttatcgtatcaaagccatttaatgtgattgtgccactatctggtcgtaggagggtggtcatcatttttaagagcgttgttttcccggcaccattgggccctaataatgcgaaaatctcacctttagaaacggctagcgaaacggaacgcaccacttttttggtcccaaatgctttttgaatattgtttacttcaatgacatgctcactgcacataatattgcctcctcatttaataatcaggtcacctgattaaaatgtcaaggattgctactcttagattttggaatggtgtatactaattaaaacagcgaagggaagatgacgtatggcaaagagtgtcaaggccgaattggtcgccggaaaattagctgaatatgaacaactcagtaagatctacgatgatatcgttaaacaagcacgcccgcatttaatcgtcgaaggccaggggaagattctattggcacttgctgatgaagatcacttatcgcaacgtgaactagcaacgcgtttgggaatgtcacctcaatcaaccagtgaatttgtcgctaaactcgctaaacgcgagctggtgacgttaagtaagctcccaagtgatcgccgggttaatttagttaacttaacggatgccggtcgtcaagaaattgaaactgccaatcaagaggtgccaccgtttgtgaacgccttgaccgaggcagaactcgaccagttagtgccactactcaacaagattacaacggcgatgtatgccgatattgatgcctcaaatccgacgttgggcgttaagtttcataaattattggccggacgatatctgaaacaatttaaaaaataaccaaaaaaatagcgcgtctcacttaaattagtggggcgcgctattgcatttaattaatcaaagtcgtaatcactatcttccatcgcttccacattccctaagcgataaccattcccaacttgggagaagaaatcgtggttggcagttgaagtcgacatcccattcaagatcacggggttcacatcttcagcgctatctgggaagagggcgccttggccgaggttcattaaggctttgttggcgttataacggaggtaagttaatacttcttctgtccaaccagtgccatcataaacttcgtgggtgtatttttcttcgttggcatataagtcgtacagtaaatcatacatccagttttgcaattcttcttgttctgacttatccaattcattgaaggctaattggaacttatagccgatgtaagtcccatggactgactcatcacggataatcaatttaatgatttcagcaacgttggccaacttattgttccctaagtaatagagtggggtatagaaaccagaatagaagaggaaggtttctaaaaagacgctggcaattttttgttgcaatggtgtgccgttttgatagatatcgttaatcttgttggctttgtattgcaagaattcattcgtgttggtccagtcgaagatttcatcaatttcagttggtgtgtttaacgttgaaaaaatggatgaataactcttcgcatgcacggattccatgaattgaatgttgtttaaaacggcttcttcatgttgagtgcggatattggcttttaagctggccatcccatcttgtgattgtagcgtatcaagtagggttaaaccgccaaagacatgcccgacgatccatttttcattgtctggtaaactgcgccagtcatctaagtcattggaaaggggaatccgcgtatctaaccaaaattgttcggttaatttttcccaggttgctttatcaatttgatcttcaacttggttccagttaattgcaatataattttctgccatgttcatgaactccttttaacgtgcttcttttttaggtatgtaggccagctgacgagcagctggagtggagatttggtgtttgctttgaaacgtgcttttcaagctaactttctgcgcttagcccagtgaatcaaatcatcgactacttcgctaattcgcttccctatgctaatgctcaaaatataaacgcctgccgtcgcactctgttttgaaacgtgctttttgaaactgacttctgcgcttagttacactcggcgaataactgcttataagcagttattcgccgagttagactaatgctcaaagtcaaaccgtttcaaacgcactctagattacacaactttcgcatgcatttgcgccgacttcactttcgtcgtctgtgtaagtccggatgtagtagattgatttaatccctttgtggtgggcgtagtttcttaagatgtttaagtcccgggtggtcattttgtcagtccggccgtttttccattcgtaaaggcctgctggaatcgttgaacgcatgaagagtgtcatactcatcccttggtcgacatgtttttgtgctgctgcgtagatgtcgatgactttacgcatgtcaatgtcataagctgattcataatatggcatggtatcgtttgaaagacctggggcagggtagtagattgtcccaattttcttttcttgtcgatcttcaatccggttaacaatcggttgtaagctagcagaagtatcattgatgtatgaaattgaaccgtttggtgcaacggctaagcggttttgatggtataaaccgtcttgcatgatggctagttttaaagcttcccaatcggcttttgtgggaatcataatgtccttgaaaatcgctttgactttgtccgtcttaggggcccagtcttcagtgaggtattgatcgaagtaactaccatcagcatacttactcttttcaaagttggcaaaggtcatctgacgttccttagcaatcttatttgaagcaacaagtgtccagtagtttaaaagcatgaaataattactggtaaagtcgattgattcttctgacccatacatcatgtggttcttggcaaagaaggtatgcagacccatgccacctaaaccaatggtgtgggccaattcgttcccatgagccacagaagggaccacatcaatatcagaatgatctgtgacgtaggttaaagcacgcaccatggcttcgatagaaccaccaaagtcaggtgacgtcatcatgttcggaatattcgttgaacccaggttacaactgatatccgtccctaacacgtcatattcttggcggttattaatttgtgacggggtttgcacttggaggacttcagaacagaggttactcatgatgatcttcccatcaattgggttcgcagcattggctgtgtccacattgacgatgtaaggataacctgattcttgttgcaatttactaatttcattttctaaatcacgggctttaattttggttttcttgatgttatcgttggcgattaagttgtcatattctttggtgatgtcaacatatgagaaaggtacgccgtattctttttcaacaccgtaagggctgaataaatacatatcagcatcagctttcaccaattcatagaacttgtcggggacgactaagcctaatgagagggtctttaaacgatatttttcgtctgcattttcttttttagcacctaagaaagcaatcacatctggatggaaggcgtttaaataaaccacgccggcgccttgccgttgacctaattggtttgagtatgagaaagaatcctccaataacttcatgacaggtaggacaccacttgctgcaccgtcgatgcctttgattggatcgccagctccacggaggttcgacaagctaatcccaaccccgccaccaatccgtgataattcaagtgccgagttaatcgtccgaccaattgaattcatatcatcggttgtttggagtaagaaacatgaaactaattcaccacgccgtgaacgcccagcattcaaaaacgatggtgttgccggttgataacgttggtggatcatttcatccgctagttgcagcgcaagggtttgatcaccatctgcgaagtagagagcattcacaaaaacgcgatctttaaaatcttcaagataaaagccattgtcgtttgtttttaatgcgtattgcgcatagaacttataagcagccataaatgacttgaagtggaagtcttggtcctttaaatattgattcaattcttccatgaatgaaagagaataagccttcaaaaaatctgcttcataataattttccgcgactaaataatctagacgatcttgaagtgatttaaacgtcaccatattgggttgtacgttttgttccaaaaaggcatcgagtgcttcttgatccttttgtaatggaatttgaccattcactggaatattaatttggttattcaattcatagtatgttacatcttcggttttaatctcttttaaagacatccttgccaccactttctagtcatattagctgttttagggtttaaaaaaagtgaagaccaactctttagtaatcaagagtcggcctcacccgttaaaactgggaatgcatggtgcttaaatcgccaatttttgcaattccgctggtctaaaacctgagaagctttctaggccatccgcttctaaaacgggaacggcttggaaaccttgttccttcaagtaatcaatatattgtggttcgtcattgatgttatgttcaacaaaaggaacgttgtgcgtttctaaaaagtgtttcgtcatccggcattgtgggcagccgttcttagtatataatgtgatatttgccataatcgttaactcccttgtatttctcttatcgataaaaatagtataccgttttgaaatggaagatgcaatcaataaacaccacatattgtagataaaacaaaaaacgaccactaattatagtggtcgtttacgaatgttcatttgattgtcttgggcaacgtcctgtacttaagttaaacatatttatgggtaaagtcaatccctgctaatgcgcaaaatttttcaaaagcacgccggacaaagcttaacagattttaaaaaattttttagattgggattaatttaatattgcaccatcataaaaatgagttaacgaacattttataaaattggtgaaagtaaccgtgaaaatttttgtttaaatttcaaccaagttgactgttgggcgattatttcgtctgttagtagggatgctttttccatatcagcctgatagatcgcttcaagttgcgctgcaactttcggatcgtaaataaacgtattggcttcaaagttcagcttgaaactacggatatccatattggcagaacctacagtgctgatatgcccatccatgaccgccgtcttagcatgtaagaatccatcttcataccggtaaatcttaacgccagctgcatgcaagagttgactgtagtattctgttgcacggtagatgaaggggtgatccggcatgttaggcgtcatgatacgaacatccaccccggacattgccgcagtcgtcaacgcatcaataatactatcatccggaactagatagggcgtttgaatccataaacgcttcttagcggtactaatcatcttcagataaccgagtttgatttgttcatctaatttatcgggaccacttgagacaatttgcatggctgctgatccacgattttgggattggtccactgggaagagttcttccgagtaagttaacttaatcgcagactcaacactcgcgttccagtccatcataaagcgtacttgtaaggctaacacggcattgccggtaatccgcatatgggtatcacgccaatgtccgaatttcttactccggcctagatattgatcaccaacgttaaagccaccaatataaccaatcttaccgtcaattaccacaatcttacggtgatcacggaagttcaagcgaaaatcggtaatcgtgtgttttgaactgaagaacgttcgcgcgtggccaccgacatcttcaagtgcgcgccaccatttttgcgttgcgccttgggagccccaagcatcgtagacaacgttgactgaaacgccttctttggctttttgaatcaatagttgttgtaactcattgcccaatcggtcattatagatcgtataatattcgatatgaatacttttttgagcttgtttgatgtcggcaaagagggcgtcaaactttgcttgcccgtcagtatagattttgacatggttattctttaaaacgggtgcattattaatatttaaaaagagattcaccatttcggatgcttcactggaaagcatctttttcggtaagaggtcgtttttacgattttccttacgttgaatgtcgaccaatgcggaaagcccatcatcgatttgcgattgactttggaaaatctttttccgcgataagccccgtccggtaaacatatataggataaaaccgcccacgggtagtaaaattaagactagcagccacgcccaggtggccgcaatatcgcggggctgtctcagaattgtaataattgccaataaggcattaatgaagatgatgaatgacattatttctgtaactaaaaccatatcgtactcctccaaaattctagcgttgcttattattttactaaaatcacgctcaaagcgctagttaagcctatcaacagtcagttaaatgaggtaatccctgttgggccagatggtgcgccccctgattctgacgctctggaatccattggtggatgaccattgaatagggcgcctcaagtgctagaatccggtcgacggcagcttgataatgtttagcataccgcttttctaggctctgaaagacaagcttgctgtcaacgttaatctgtagtattttcgtggtaagcccccgattggctagttgttctaagccaagaatgaccgccgaaaattctgcatcatgattggactgttctggcaaaggtgcttgtagttgatattgtcgctctggtgtcacgattaaaattcccgccgcacttggtccgggattgccacgagttgctgcgtccgtataaagtttaatcattcttaaaatttaccgcctttcactgacagcagggtcaggttaatggtatgatacaaagcgtaaaaaggagtgttctcatgcaaaagacaaccaccgcattctaccaaccaaattatgcttacttcgtgacgatttggtcttggattggcttcgtctatacattagctttaattgtacaacttgaactcatcaacttaaactggcaatcgtggggcatcggcttaattgccgtttggttgacgctatgggtcattttcgggcatcgtgtttcaatgacggcagacgtgatcacgcttaaacggccggtatttaaatataatcgaaccatcaaccgtgaaacgactacgaccattattgtccaaaaacatggtttattaattaaaaccaacgaacttgattaccaacccgaacaaatactccttagtcgcaaagccaagcaggcattcgttgaacaactgaaacaaaatggttggccaattgaagaatagttaaataaaaaagagccacgacaaacattaatcttgtcgtggctcttttttagcgtttaaacgtatttttattctgctatcttttgcacgttagctgcctgcaaaccgcgggcgccttctttaatctcaaataataccggctcgtctttattcaatgatttatagccgtcagtttggattgcggtaaaatggacgaaaacctcctcgtcatctccataactgatgaagccataacctttagcattgctaaaccacttaacgattcctcgttccatcacaatccctccttgaaatgttaatcagcgtacgcgctcattttaccacgtacaaagaagtgtgtcgaagaatatcgttctttttaagcatcccatctgccaattccgtacgtaatcagctatactaggtagtatcataaataaaaaggagctgggcggtatgtcagatattcaaatagcacaggaaaatgaagctaaggagatgcagccaatcacggcaattgccgaacaagctggtttaacggccgctgatttagaacaatatggaccgtataaagcgaaggttaatttcgctgccattaatcgattgaaagaaaaagaagatggcaaactcatcttagtgacctcaatcaatcccacaccagctggagaaggtaaatcaaccgtgactgtcggtcttggcgacgcccttcgtcaactagatcaatcagccgtcattgctttacgtgaaccttcactaggccccgtcatggggatgaaaggtggcgcaactggtgggggctatgcccaagtggtaccaatggcagatattaacttacattttacaggggatatgcacgcattgaccgctgctgtgaatactttagccgccctaatcgataaccatctgcaacagggaaatgccctcaacattgatccccgccgaattatttggaaacgggcgcttgatattaatgatcgtgcattacgccaagttgtcattggacttggtggtccagtgcaagggatgccgcgccaagatggttttgacattaccgttgctagcgaattaatggccattctctgcttagcaactgacattactgacttgaagcggcgcattagccaaatcgtcattggttacacttatgatcggcaacccgtcacagttggcgagctcgaaatcaccggtgcaatcgcgatgcttttaaaagatgccctcaaaccaaacctcgtccaaacgcttgaacatacaccagccttaattcacggtggaccatttgccaatatcgcccacggctgtaacagtattttagcaacccaaacggccctaaaaatgggtgatattgcgattactgaagctggcttcggcgctgacttaggtgctgaaaagttcctagacatcaaagtcccacaacttggcaagactccggataccatcgtgattgttgccactgttcgggcgttaaaatacaacggtggtgttgctttagctgatctaaccactgaaaatctcggtgcgttagacaaagggtttagtaacttagccaaacatattgctaatatgcaacgttacggcattcccgtagtcgttgccatcaatgagtttacaagtgataccgaagcagaggttacaatgctccaagaaaaatgtgctgaactgggtgtcaaagccgttttagctagtgtttgggcacatggtggtaaaggtggccttgatttagcccaggccgtcttagaagcactcgatcaacctaaaaacttccaaccattatatgattcaaacgccgacattcaatcgaaactaaccacaattgtcactgacatctatggcggtaaagaggttgttttcgagggcaaagctatcaaccaactgaaagaaatcgaaaaaaatggctgggaccacttaccagtctgtatcgccaaaacacaatattcactctcagacgatccaaaagcattaggcgcaccaactgatttcaccgttcacgtccgtgaattgattccaaagcttggcgcaggcttcatcgtcgcaatgaccggcacagtcctcaccatgccaggtctaccaaagaaaccagccgccctcaacatggacgtcacagaagatggcctgattagcggattattctagagtgcgtttgaaacggttagcttctgagcattaatagaatttgacgaattgccgatacaatcggcgatttggcaaatttggttaagcgcagaaagttagcttgaaaagcacgttttccaatatcctaacgcccatctcgaaaactgattgacaagtcagccgattttaaggacaatggtagattgtatgaataggaggttcccatgctcatctatatcgttttagccgcagtcattgtactcggtgaccaacttttaaaaagctggattgttgcccatgttgcctttgcagcaacccaacccgttattccgaacgtactgagtttaacgtatgttcaaaacgatggggctgcgtggagtatcttggccggtcaacagtggtttttctacctcgtcaccattgtggccctcggggtaattggctacttattttatacctctgatcgcactgaaaaattttaccggatcggtttaacgttgctgttagccggaacacttggtaacttcatcgatcggctccaccttaagtacgtcgtagacatgttccaaatcgaatttattaatttccccatctttaacgttgcggatgttgccttaacagtaggcgtcatctgcgtctttattgctattttgttgaaagagaaagtgactcatgactgaaactaaacaattaacgattacaactgaaacaggccggattgataaggcgctcacccaattactacccgattactcacgttcacaaatccagcaatggttgaaaaaagacttggtgcaagtcaatgatcaaccttgtaagagtaaccgcaaagtcgtaacaggggatgtcgtcaccgtcaatattccagaccctgtcacgctcgacttaaccccagaagatattccgctcgatatcgtctatgaagacgatcaagtcctcgtagtcaataaaccacaagggatggtggttcatccatcagctggccacccgaatgggacattggtcaacgctttattggcgcacaccccattgtctgaaatcaacggcgtcttccggccggggattgtccatcgaattgataaagatacctctggtcttttgatggtggctaaaaccaacgaagcccacgaatctttatccgcccaactcaaagctaaggaaaacttacgtgaatatatcgcgctagtccacggcaacatcgaagaagacgaggggaccattgatgcacccattggtcgttcaaaagtcgaccggatgaaacaagcaatcgtcgaagatggccgcccagcggtcacgcattttacggtcatggaacggtttgaagacttcacattaatcaaatgtcgactagaaactgggcgcacccatcaaattcgcgttcacttagcctatattaaccggccagttgctggcgatcccgtttatggtccccgcaaaactttagctgggcatggtcagttcttacatgctgctgtattaggctttaagcacccaacgacgggcgaaatgatgcgctttgaagccccattacccgcaatcttcgagaaaactttaaccgaattacgtgaaaatcattgacaaatcaaggattctccgttaagctaggtctaacttaatagaagcctttaaaatcggtcccgtgaggccgagaaggtacggtgaaagcaccactagacgcggagtccctaactgtaacctctcgaccttatcggtttgagaggttttttgtttggaaggagtctttacgatggtcaaagaagtggtcgacagtaacacaatgaaacgggtctttactcggattacgtacgaaattatcgaacagaataaggggatttcagatctcgtcctcgtcggcattaaaacccgtggcgtgtttattgcccaacggattgcagaacgcctcgaacaattagaaggcatcgcattgcccgtcggtacactagacattacgttataccgcgatgatcaacatgatcttgatacacaaaatgaaccacagattaacgggagcgatattcccgttgatatcacaaataagcatgtcatcttaatcgacgatgtgctttacacagggcggacgattcgggccgcgcttgacgccttaatggacttaggccggccaaagaaaatttcattggctgtcttagtcgatcgtggtcatcgtgaattaccaattcgccccgattttgtcggtaaaaatattccaaccgcgctcaacgaacaaattcgcgttgcgatggaagaaattgatcaacatgatgggattaccatcgaaaaactaactaaataacgactgaaccgtttaattgtctccagagagagcaaaagggtttgtcttgaacttagtgcgcctaaaaaaaggggcctaagtccgtcaagggacacacctaccaatctgttggagcgtgtgtctttttttggttcaaaaagtcgtcgacatggaggaaatacttatggctacacaatttagaaatcccgatgcggtcttagacgtcaacgaacgacccagcaccggtaaatggattggtttatccattcaacatatgtttgcaatgtttggctcaaccgtcctagtgccaatcttagtcggtttaaacccagggattgcgttattcagttccggggtcggcactttaatgtacctcttgattaccaaaggcaagattccagcatacatggggtcgagtttctcattcatcgtgccaatgctcgctttaatgaaaacgactggctatcctgggattgcacaagggacaatggcggttggggcagtctacttaatcgtttcaatcttagtcagtctgattggttccgactggatcgacaaagccttaccacccattgttgtcggcccaatcgtgatggtgattggcttatcactcgctggcacagctgccaaacaagccactatcaatgcccacgggaattacgacttaaaattcttcgcagtcgctttactaacgttgttaatcaccatcggctttaatatgtatctcaaaggattcatgagcttagtccccatcttgctcggcatcattgctggctacatcatcgccgtcttgttcgggatcgtcgattttcaacccgtgatggacgccccttggtttaaagtaccagacttccaagtcccatttgtcacttacaaacccggtctgtactggggcgcgattctcagcatggcaccaattgcctttgtcacaatgaccgaacacatgggccacattatggtcttaaacaaactcaccaagcgtaacttctttaaagatcctggtcttcaccgcacgttagccggggacgggacagcctcaatcatcgccgcttttgtcggaggaccgcccgtcacaagttatggtgaaaacatcggtgtcctcgccatcaccaaagtccacagtgtctgggtcttaggtggcgccgcattcttcgccatgatcttcggcttcatcggcaaactgagcgcgttgattcaaagcatccccacacccgtaattggtgggattagcttcttactcttcggggtcatcgcctcaagcggtttgcgcgtcttaatcgacaaacaagtcgattttgataagaaacgcaacttaatgattggttcatcaatcctcgtcatcgggattggcaatgcctacttacaattaggccaataccaattctcagggctagccatcgccaccgtccttgggattgtcttaaaccttgttttaccggataaagcaaagagcgaacttgaattggaggctcaacaaaatgcaaaagcataacgcgttggtttccgttgatcaactcaccaatgatttagtcgcaggtctcatcaaccgcgctagcgcctttaaaaagggcgcgacaagcaaattaactcggccggtctacgcaatgaacctattctttgaaaatagcacacggacccatacgagtttcgaaatggcagaacgcaaactcggcatgaccgtcttagacttcaatgccgatacgagttcgacttccaaaggcgagaccctcagcgatacgctcaaaacggtacaagccattggcgtcgatttcgttgctgtccgccattctcagaataattattacgacgccttactcgcagatgatcaattccacatggcactggccaatgcgggcgatgggagtgggcaacacccatcccaatgcttactcgatttaatgacgattcacgaagagttcggccactttgtaggcttaaaagtcgtcatctgtggtgacttgcgtcattcccgggtggcacggtcaaatatgcaactgctcaaacaactcggcgcaacattgtattttgccggccctgaggaatggttcgcccctgaatttgcccaatacggacaaccagcccaactcgatgacgtcttaccagaagttgacgtcgtcatgttactccggattcaacacgaacgctttgctgccgatgaaaccttatctgacactgcattccatactcagtacggtttgacaactgagcgggcagcacaccttaagtccagtgctatctggttgcacccagcacccgtcaatcgtgacgttgaaattgccgacgaactcgttgaagccccacaatcgcgaatttttaaacaaatgaccaacggcgtttttatgcggatggccatcattgaacacctattagaccaacaacatctgattcaacattaagagggggatctgctatgtatcaattgatcaaaaacggccaagtcttgattgacggccaactgcaaaaacgcgacatcgccatcgatgcaaccggtcagattacggcaattgaaccaacgattaccgcagtcccaaccgacccagaaacgatttatgacgcacacggccatttcgtcagtgccggcttaatcgacggacacgtccacttcagagatccaggcttcacgacaaaagaaacactcaaaacagggagcgcagcggttgcccacggtggttttactagcgtaattgcaatgccgaacttaaagcccgtacctgataacttgctagatttcaagacactggttgcacgcaatcaggcagaaaccagcgtccacacatatcaatttgcaccgattaccaatgagttaactgaacaaacaattgtcgacatgtcggcgtttaaggcagctggtgcagcaggctttaccaacgatggtcatggggtacaaacggcacaaacaatgtaccaagcgatgcagatggccgcccagattaacatgcccatcgtcgcgcacgtcgaagatgaatcactcgtcaatggcggcgtcattcacgacggtcaagccgctaaaaaactaggcgttcccggaattgcgagtgtcagtgaatccgcccaagtcgcccgggatatcgagctagcgcgggcgaccggcgttcattatcatatctgccacatctcaactaaggaaaccgtcaatctcgttcgccgcgcaaaacaagatggcctcaacgtcacttgcgaagtcaccccacatcatttgttactcgatgattcagcgattaccagtgacaacgcaatgctcaaaatgaatccgccacttcgaacacttgcagatcgccaagcactctgggcgggcttaatggatgggacgattgatattattgcgaccgatcacgcaccgcataccacagaagagaaacaacaggcgttattgaaagcgccatttggtatagtagggagtgaaacagcctttagcttgctatacacgcatttagttgccaacggtccatttagtctcgcgcaactgacaagctggctaacaaccaacccggcccatgttttcaacttaccacacgccggccagttagcggttggccaaccagctgaccttgctgtttttaatttaacggataccaccacaatcgacgcaaacactttcttatcgaaaggccacaacacgccatttatcggcgaagcagtgcaaggtgatactttattaaccttggttgctggtcagattgcatatcaaaaggagtgtgtcatcaacgggtaacttctgagcatttacctgacttggcggattggtgttgcagacaccgatttgacaagtgtcgtaaaggacaagaagttgttgatgaaagcacgttcaaaaaaggagtgaactaaaagatgaaacgttaccttattttagaagatggcaccatcttccccggcaccggttttggcgccccaattatctcgacaggcgaaatcgtctttaacaccgggatgagtgggtaccaagaaaccattactgatcaatcatacaacggccaaatcatcgcttttacataccctttaatcggtaattacggggtcaaccgcgacgactttgaatcgattaaaccaacctgtaaaggagttgtcgcccatgaaacaccacgcctagcaaataactggcggatgaatatgagtcttgatgactttttaaagcaaaagaaaattcctgggattgccggcatcgatacgcgggcactcactcgccgtctgcgcgataaagggaccatgaaagccagcatcgttgatgccgcagacgatcacgcgttcgatcaactcaaggcattggtcttaccaaaaaaccaagtccaacaagtctcaacggccaaaccttatccgagtcctgctaacgggcggaacatcgtcgtgattgactttggcttaaaacatagtatccttcgtgaactgtcaaaacgcgactgtaacatcactgtcttaccatacaacacaacagctgaagaaattctgagtctcgatccagacggcgtcatgttaaccaacggccctggtgatccagaagatgtgccagaagccattgaaatgatcaaagggattcaaggtaaagtgccgattttcgggatttgtctcggtcaccaactttttgccctcgccaatggggctaaaacctacaagatgaagttcggccaccgtggtttcaaccatccggtccgagaagttgccaccaaacggatcgacttcacatctcaaaatcatgggtacgccgtggatgccgactccatcgacccacaaaaccttctgattacacacgttgaaattaacgatcaaacagtcgaaggtctccgtcatagacaatatccggccttttccgttcaattccatccagacgcagcccctggtccacacgacgctgcacatctattcgatgaatttatcgacatgatcgatgacttcaatcgccgccaaaaatagtaaagaggggatttagtgatgccaaaacgtaccgatattcataaaattttagtgattggctctggcccaatcgtaattggtcaagccgccgagtttgattactcaggcactcaagcctgcttagcgcttaaagaagaaggctaccaagtcgttttaattaactcaaatcctgcgacaatcatgactgataaagccgttgctgatacggtttatatcgaaccgatcacgattgactttgtcacgcaaattctacgcaaagaactcccagatgccatcttaccaaccctcggcggccaaaccggattaaatatggctttggaactggcaaacaacgggattctcgccgagctgaacattgaattgctcggtaccaagctcagcgcgattgatcaagctgaagaccgcgaactgtttaaaaacttgatgaatcagttaaacgaaccgattccagaatctgcgattgcccattcactcgttgaagcccaaacattcgttaacgaaaacgggtatccggtcattatccgtccagcctttacccttggtggcactggtggcgggattgccgaaaatgccggtgaactgagcacaattgtcaaaaacgggcttagcctatctccagtcggacaagtcctcgttgaacaaagtattgccggtttcaaggaaatcgaattcgaagtcatgcgcgacaaaaatgacaacgcgctagtcgtctgcaacatggaaaacttcgacccagtcgggattcatactggcgattccatcgtatttgcacccgttcaaaccttaagtgaccgtgaagtccaagcattgcgcgatgccgcacttaaaatcattcgcgccttgaagattgaagggggctgtaacgttcaactcgcccttgatcctaatagcgaccgctactacattatcgaagtcaatccacgggtgagtcgttcatcagcccttgcttctaaagcaactggctatccaattgcaaaaatggcggctaaaatcgccatcggtttaacacttgatgaaattcataatccaatcaccgggacaacctatgcgcaatttgaaccgatgctcgattacgtcgttgcgaagattccccgttggccatttgataaattcaacaaaggtgatcggcaactcggcacccaaatgaaggccaccggtgaagtgatggccattggacgcaacattgaagaagcattactcaaagccgttcgctcacttgaaattggtactgaccatctcgaaattccagcattgacggcagtcggtgataacgaccttgtccaacggattgtacatccccaagacgaccgacttttctaccttgccgaagcattgcgccgcggttattcaattcaagaacttagtgaattgacaaaaattgatcttttcttcctggataaactcagccacattgttgaaattgaagaacaactccggaccgataaaggtgacttagaattactcgaactcgccaagaaaaatggctttgccgacgctaaaattgccgcaacttggcaaatcatgcctgcccaagtccgccaaatgcgccaagaaagtggcattcagccagtttataagatggtcgatacttgtgcagccgaattcgaatcacaaacaccttattactacgcgacttacgaacaagaaaacgaaagcattgtcagcacaaagccttcaatcttagtgattggttccggtccaattcggattgggcagggggttgaattcgattatgcaaccgtccactgtgtgcaagccatccaaaaggcgggctacgaagcaattatcatgaacagtaatccagaaacagtttcgactgacttttcaatttcagataaattgtacttcgaaccactgacactagaagatgtcctcaacgtcgttgaactcgaaaaaccagaaggggtgattgtgcaattcggggggcaaacagccatcaaccttgccgaaccactgaccgaaaatggtgtgcagattctcgggacaagcgtcgcgaacttaaaccgcgctgaagaccgtgaccaattcgatcaattaatcgccgaactcgacattccacaaccagtcggggcaaccgcaaccaatacgccagatgcgttgaagattgctgaagagattggttatccggtcttaatccgacctagtttcgttttaggcgggcgggcaatggaaatcgttcatactgcagaagaccttacacattacatgaaagaggccgttaaagtttcagtcgaccaaccggtcctaattgaccgctacttaatgggcaaagaatgcgaagtcgatgccatctgtgacggcaaagatgtcttaattccgggaattatggaacatatcgaacgcgctggtgttcattcgggcgattcaatggcggtttatccaccacaaaatctgacggatgcggaaaaacaagccatcatcacttacacgaccaagctctgtttagcacttgaatgtcgcggcttgttaaacatccaattcattatccaaaatgaagcagtctacgtgattgaagtcaatccacgggctagtcggaccgttccattcttgagtaaagtcaccggcatctcgatggcgcaactggccacccaagtcattttaggcagcacactagctgaattaaagagcccaaccggtctattaccagcgggcccactaattcatattaaagcacctgtcttctcattctcgaaactcacgcgggttgatagcttactcgggccagaaatgaaatcgaccggggaagtcatgggaactgacgtaacgatgcaaaaagcactctataaagcgttcgaagctagtgggatgcacttaccaagtcacgggaacgtcttaatgacaattactaaccaagataagacacaagcgctcgaattagcaaaacgcttccgcgaagttggctatcaaatcattgccacgcctgggactagtcaagaattccaagcagcaggtgtgccagtgcaatccgttgccaagattaatgctacgagcggcgatttacttgataaaatcaaagccggccacattcaactggtcatcaacacaaccggcttgaacgaagccccacaagtcgctaaagacagcatcgtcattcgccaaaccgccattgaacacggcattccattgatgacctcattggataccgctgatgcgatcttagcggtcctagaatctcaatcgctcctgaccaaaccactttaaaaccactaaaagagtctgaagccctttgcctaaggctcttttattacataaaaatcagaaggaggctgctaaatgttgccattagaataccaattaaccctcactaagcaaaccgaaattgcccccagtatctatgaattatgcctcaccggagacctcgcacagcaacccattgcaccgggacaatttgtcgatatcaaaatccccagtgacgcccttttattacgtcggccatttgggattgccaatgtcgaccgccaaactaacacgattaccttgttataccgcgttgttggtggaggcaccacgatcttaagtgaatcaccggtgggcacaagcttgtccgtcttagggcctcttggtaacggttatccaattgaccaattagtagccggacaaaacgcgctaatcattggtggcgggactgggattccaccattacatgaactctcacggcaacttaatgcaaaaggcgttcacgttcaacacgtgttcggctttgcaactaaagcagccattttctatgaagatcactttcgcaagctcgggccagtcgcttatgcgacaaatgatggctcgtacggctaccaaggccatgttggtttattactcgatgcacagtttgctgatgcgacaacccgatatgatgccatttacgcatgcggaccaaaaggcttgttaatggccgtcgataatcgattcagtgagcatcccaatgcctatatctcattggaagaacggatggcttgtgggattggtgcctgctacgcctgtgtcaccaaactcaaacgtgatccaagcattcagctcaaaatttgcgatgacggacccgtcttcaaaacgaacgaggtgctcatttaatgacagacttagcagtaactttaccaggcttagctttaaaaaatccgattatgcccgcctccgggtgttttggcttcggtcaggaatacggtcgctattatgacctcaacgaacttggcgcaattattatcaaagcggcaacgaaagaaccccgacttggcaatgcgacaccacgggttgctgaaagcccaagtgggatgttgaacgcgattggcttacaaaatcccgggattgaagtcattatgcaagaaaaattaccctggttagccgagcattatcccgagttaccaatcatctccaatgtcgccggcaataccgaagctgattacgtcgctgtctgtgaacaaatcagccaagcgcccaacgtccatgccatcgaactgaatatctcgtgcccaaacgtggcccatggcggtcttgaatttggcacatcaccagaagccgctgccacgttgacgaaggcctgtgttgcagtcagccaagtgccggtttacgtgaagctctcaccaaacgtgacggatattcgtccgattgcgcaagcagttgaagcagcgggggcagccggcttctcattaatcaatacactggtggggatgcggattgatccaaaaacacgccaaccaattctcgctaatcaaacaggcggcttatctggaccagcgataaaacccgttgccatccggctcattcatcaagtccgttcaatttcgaaattaccgattattggaatgggcggtgtctcaacagctgcggatgcacttgaattaatggccgccggcgccaatgccatcgcagtcggcactgctaatttcagcgatccatttgcctgtccaaaactaatcgccgcattaccagatgaactcgctaaatatcaactaaccgatttaaaatcattcggtctaccacaggagggcactcatgactaaccctttaattatcgcgctcgactttccaaactgggaaacaacagatcgttttttagtgcaatttccaactgatgaatccttattcgttaaagtcggcatggaacttttttaccaagagggaccacagctgattaaaacgttaaaagcgcgcggctatcagatttttctcgacctaaaactctatgacattccaaacaccgttcaaagcgcgatgactgttatcggccaactcggtgtcgattacacaacgattcacgcagctggtgggcaggcaatgctcaaagcaggggcggctggtctgaaaaaaggcgccgcacttggcaacgtgcggcccgctaaactactagcgattacgcagcttacgtcgaccagcgaagcgcaaatgcaaaccgaacaactcgttaatgtcagcctaccagaatctgtcgcacactatgcgcaactcgcacagaactcggattgcgatggcgtggtctgttctgctcaagaggtgccaacgattcgcgaacacaccaatgctgattttctctgcgtcacacctgggattcggccagcaacaagccaaaccaatgatcaaaaacgggctgtaacaccacacgaagccgcacaagctgagagctcggcgattgtcgttgggcgcccaattacgcaagctacaaatccatatcaagcttaccaagctatcaaatcagaatgggagtctttcaaatgacaacaattgcacaccaagtcgcacaagccttaatcgatattcatgccgtcagtctcagtcctaacaacccttttacttgggcgagtgggctaagaagtcccatctattgcgataaccgtttaacgattggttatccaaaagtccgcaagctcattgccagcaacttagctgcggcaatcaaagcgcaattcccagacgttgaagtcatcggcggaacagcaaccgcggggattccccatgctgcatgggtcgcagccgaactcgacttaccgatggtttacattcggtcgaaaccgaaagatcacggtcaaggccgtcaaatcgaaggaccgtttaaagccggtcaaaaattagtcctcattgacgatttaatttcaaccggcgggagtgtcttacaagcagcggccgccgctcaaaaagagggcgcagaagtccttggtatttttggcatcttttcatacgaactagcagccggccaacagaatttcgcaactgctaacttaccactaacgaccttatcgaatttctccgccttattagcggtcgaagaagccgctgataacttaactccagaacaagccacatcactcaatgaatggcgccaagacccacaagcatggtcagacgcccattagaatagagtgttaaccggaaagtaatggcttgcagaacacgtttagcgtgtgccatcagccgcaccaatcaaagaagcgttaccccaattcactttggagtaacgctttttattagtcttgcacaggtttgttacgtagcttttgaacgagttgctcgtctggtgtcgtataaagtgtttgttgcccttcgtaaatcacaaaccctggtcgcgcaccgttcggttttttaatcttcttaacctgaatataatcaactggcacggccgctgataagcgcgccttcgagaagtaggccgctaagttgccggcttcttgaagcgtatcttctgatggatctgggctatcaataatcacatgagacccgggaatgttcttcacatgcaaccagatatcagttttatgggcttttttcaaggttaattgatcattttgatagttattcttgccaacgaaaatccgggtaccatcactcgcatagaaaacttcaggttcactaatcttgtaacgtttctgcttcttggcaccggttttcttagcctttaaataaccttcagcctgtaattcagctttgatatcctctaaatctttgggttcagcaatttcaatttgcgccataatcgtgttgaagtaggcaagttctgcttcggtctttgccatttgttcattgacgtaggcaattgaattccggagcttctgatatttcgagaaatacttctgcgcattttttgaagggctaatctggttcgacaaggtaatcttaagcggttcgttattgtcgtagaaattgggcaacgtgacttcagccatgccacgttcgacttcccgcaaataggtggtcaaaatttcacccttaatccggtaatcatcagcactgtcggctgcttttaacgttttttgtagttttttcagtttcttttcatccttttgaatctcgttgcggatgaagtggatgagcgcactaccttgttgctgcactcggtcacgctgcgccttgtgtaagtaatattggtctaacagctcactcaacgtgtcaaaatggctcagtgtccctgtcaggctctcataagggaaggccgtgaaccacgacttcttttcaccaactgttaacgttggtgtcacttggtcgaattgcttgaagaaatcagtcacaaccgccaaataattgtcatgatccattaaacgggtttgtagttcaacggcactttcacgactcatcccttggaagtgttgttgtaaccatttgacttgttcatcagcagcttcgttataataacttaaccaatcaagcgtctttaaatcagtcgtaaaaccatcaaccccggttgcagccggtggactaacataatcggcaccaggcattaagaaccgataacggttttgcgaaacaccgacgtgccggattaaatcgagaatcttattggtcgcttgattaatcaaaatcacattactatggcggcccatcaattcaacgattaagcatagttgttgtaagtcccccagttcattccgtgatttaaatgtgaatcttagaatccgatcactttcaatttgcttgatgttttctaaaatggcgccatctaaatacttccgtaaagacatcgcgaagttcggtggcgttgcggggtttgcataaggcacccgcgtcacttgcactcgcgcataagatgggtgggctgataggagaaggggataggtcttacgatttgcccgaatcgttaagattacttcgtttggataaggttgttgaattttcgtaattttgccgtctgctaaagttgtatttagctcatttacaacggcgtgggtcattaaaccatcaaaggtcattattgctcacactctctataattgaattgtcttacttattgtaacggttttgcagtggaacctcaaagaaattagttgtttgcaatcgctaacacgactattgtataatacaattatcaaattgctttatacaattaaagggggatttaccgtgcgctcaaccttagcaacgtttaatcaactgaatctattgtatcaagaacaaaagaaacactgggcgctacgactcgacttgaagttagcccaagtcaatattctaatggccattgaacccgatcaagaacgcatttcgcacgcagaattaaccacgttaaccaaactcgatgcatcgacactcagtcggcagttaaatacgatggctcaagaagggctgttaacaaaagtgaccggggctgatccgcgccaacgcgtttacgcattaacaccgaccgccaaaacggcattaagtacgttgcaacaacttcaaactgaacttgaaaatcacattcaacaaaactggagtaccgatgaacagcaacttttaaaaatcctactgaaccgttattatcaaagctttaatcgaccattaaaatgagacgccctatacatttttcggaaaatcggcatttttaggggaattaacctaccatttatgatatagttattaccgaataataaaaaagtaggtgtcaccatgaaaattgctgtagtcactgatagtaccgcttatctcacagaacagcaagtgaaagaccatcatctcttcgtcgtacctattccggttatccttgatggccaggtctatgatgaaggcgttgatataaccactgaagagttctatcaaaaattaaaaacatccgaaacattccccagtacatcacaaccaccactgggtgaaatgttaaaactatacgaagacctcggcaacgaagggtatgatgctgtcatcagcatccaccttgctagtaccatctctgggtttgtcacgacattgaaaaatgcggcaagcaccatcgataacatccaggttgtcccatacgattcagggattactgtgatgttaatgggctacttagcaatggaagcggccagaatggcacgcgacccagaagtgaccgtcgaccagattatcgcacgccttgacgatctaaaaagcacaatggatgaatgtttcattgttaacgacttacaaaacttagtgcgtggtggtcgtttatcaaacgcatctgcttttattggtagcatgttgaagattaaaccgcttttaacgtttgacgctgacactaacaaaattacggcatttgagaaggttcgttcattgaagaaggcttacgcccgcgctgaacaaatttttgctgaaacagccgaacgtgttgactatccattacgcgcactaatcattcacgctaacgatgaaccagcagcgattgcatggcgtgataagcttcaagcaaactatccagacttaccaattgatatcagctactttggcccagttatcgggacccatcttggtgaaaaagccattgcacttgcttggattaaagattttgataaagcctaatttaaaagcctgtcgaacaattcgacaggctttttttgtgacttataagatagaaatgggttcttctaaggtaaccaacttcgtcccaattagcttataaataacggatttaacggctactttttgaacaatgttgagcggttcctcgtttaaattgaattcattaaccgttgattgcgcgttaatattcgcaatttcggcattaaataaccgcacaaactgatcatatgccttaccagcggtgtcgtttgccaacgattgcgaaatcccttgtttaatgacatcgagcgggaagactaatttcataatactgaccacaatcaattcggctaaatgatcccgattatagcgtttcttttccggtcgttcaataatcgccattttgacatagctattaatcattgttttcgttattttaacgtccaacaaaggactcagtcgtttattgacctcactaatgacttggtccatatagaggtctaaatctggaaattcagaccataatggtaaccgcaattgttgaaagtcacccaaccatttttcaaattcttgtgattgcatactgattaacgccaccaatctgttgatagtatatttattatgccatagcaattatcatttgtcactaacatagaatcgaattctattatctattgacttataatctacattcgcgctataatactcggcaaatagagaaaaagaggcgagaaccatgcaactttccacgattaaacgacaacaactgatttatgaaatatggaatgccattacccacgggattggttttttcggtagtttaacgttagtcatcatgctcctggtcaaaagcattcataaaacactctcaccagtcgcgattgctagtctagcagtgtatggcgccacattactgctactgtatctcgcttcgactttatttcactgcttagcatttaccaaggccaagcgcgtgtttcaaatattcgaccatagcaatattttcttgctgattgctggtacctacacgccatattgtttgatttttattggccatgcaacaggaattagcttactgattgcaatctggacactagcgattgccggtattataacgcacattttgagccacggtcggtaccaaaagattgaaacaacgatttacgttgtgatggggtggttatgtttattagctggtaagaccctttatgtcaacctcagtccagttggtttttggctgttagtcagtggtggcgtagtctttaccgttggcgctctaatttatagttttcctaaaattcctggcttacatttgatttggcactttttcgtaatgctcggaacgaccctgatgtttttttcaatttacctcaacatttaacttgaaggagtacaactcatatgacaattaaaattgtaacggactcatcgattcaactgacagcagacgaacgcgccaaatatgacattcacatcgtccccttaacgattcaacaaggaaatgagtctttcattgatggacaaaccattacccgcgctgaatttttaagtcgcttacaaaatgcaacgaccgattttccaacaacaagtcagccaactgtcggcagtttcgtcgatttatatgatcaattaggggctgatggtagtacgattctatcgattcattgtaccggcttgttaagtggcacaatcgaaggggcacacacagcagcccaccaatcaacaagtgacgtacacgtgattgatagtaaagcaatcgaccgtggacttgcttatcaagtggttgctgccgcccaagacgttgaagcagggaagcctcttgatgatattatcgcgcatctcgatgacatccgtcgtaaaaccgaaacctacgtctttttagattcacttgacgcgcttcaacgcggtggtcgaattagtagaatggccgggctattaacgaaaatcattaaacttaaggtaattgtgcgcttaacagatacggaattagaagtcgtcgcaaaggggcggggactaaaagcttttacaaaagaaatcaacaatatccgtgaatacttagccacccaagacgttgcggaaatcggcatctcacacgtcggaatcacggatgaactatccgctaagatccaagcaacgcttgaagaaacacagccccatgtgccttatacagtcgcactaaccagcccggtcattatgagtcacgttggcctaggggcgtttggtattttctatcggacaaaataacagctgacaagaacgtctcattcgaggcgttcttttttattgccccttaaaattgcgcaaaatctagttgcgttatttcaaagaatcgtttatattagaatgaacgttctaataagagaggagcatccagatgcggacaaaaacatttgaagcaccggttgtcttagacaaagccatgcttgtcttttggcaacaaggctatgagaatacctcaatgcaaaacctagttgatgcaatggggattcaccggcgcagtatttacgatacattcggcgataaacatgaactgtttatccaagtactagcacattatcgtgaccaaattaacgagcgtttcgagcaagtactggcaacacataccgatttaaggtcgcgcttaacagccatttttgaaatatttattgaccatccggataaccaaccagccggctgcttagtggtgaataccgcggcaacgttaaattcattagaaccagacatccaaacgctgattcagcattatttaacccaagaaaaagcactgttgcaggcattactgattgccggccaggccgaactagaaccgtctgttgcaattgatcttttagctgcatcgcttcaaagtgcgctcattggtatccgggtcatggctaaagtgaacccagattcaactacgctaacagcaattgtgcaacaaaccctacaaacactcccgtggaaagaggttttctaatatgaaagcagctcaaattaaaaaatataatcaaacactagctgtcacgattcaagaaattgatcgcccacaaccgctagccaatgaagtactcgtcaaagtcgcctatgcagcggtgaatccattggatccaatgaatatccgcggcgatactaaattaatgcaaaactatgctttaccactgactttaggcaatgaaattgccggtgaaatcacagcgattggaacagacgtcactgatttcaaagtcggggatcaagtctatgcgcgtttaccattggctaaaatcggtggctttgctgaatatgtcgcggttaccaccgatgcaatctggtacacgccaaaggatttatcgctacgtgaagccgttgcaatcccactgactggcttaacggcttatcaggggctatttgaggaattggcagcccaaccgaaccgaacgctgtttatccctggtggttcaggcggtttcggtccaatagccgtcccaatcgcaaaatcactaggcttaaccgtgattgtttcaggcaatgcagccgcgcgagatcacattttgaatttgggtgctgaccaatatatcgattacaaaacaaccgattactgggaagttttagatcaaatcgattacgtgattgatacacgcggtggagcagatattgaacgtgaaatggcgattatgaagccgggcgggcggattttaagcttgattgccggtccaaacaaacaattcgctaaacaattgcaattaccattttggaagcaactcttattctcgttggccgggcggaaatgggatcgcctcgctaaaaaagcgtgcgttgaatatcgctttattttcgttcgttcagatggtgcccaactcaaaaaaatcactgaaattgttgaacaacaagcgattgtaccagccatcgatccgcatcaattcgatttagcacacgttaaagaggcactagaacttgttgctcacggccatccaactgataaagtggtgattaaggttcaagcgggctaatcaagatgacttatctaacaacccccaaccaatttattcaagatcaacaaggccaacggtttgcttaccgcgaagtgggtaccggtcgcggcttaccacttgttttattgaatcacttatcagccactttagataactgggaccctgcattaattgacctgatcagtcagcaacgacgcgtgattgtctttaataatcgtggtgttggtttctcggatggcaaagtccccacgacgattgagcaaatggtagctgattgttatgcttttataacagctatgcagctcactcaattcgatttacttggattatcgatgggtggttttattgcacaggccttcactttaaaatacccctcaagcgttaatcacttaattttagtcggaacaggtccccagggtgactcagaaatcgccaaagtggggcgcataacaacttttgacttaattcggtccttcttaacgcatagagacgttaaggaatacctcttcttcaccagaacgccccaaggcaaacaggctggtaaagcgttcattaaccggttaaaacagcgtgaaattgttgaagataaagccattacgttagccacttatcgtcgtcaattaatagcaattaaacagtatgcgcacgatcaaccggcaaacctggcacaaattaaccaaccaacattgattgtcaacggcgatcacgatcgaatggtacctgttaatggttcatatgaattacatgaacggattttaaattcccaattaaaactttacccagatgctggtcatatggcgttattccaaaatccaaatgactttgcagctttgttggctcagtttttaaatcactaattacagaagcgtcattttaatatggcgcttttttgctgcgcttaaacgctggtgacgagtgggtaggcttagttaattttttaaatctattttagtttacataatatatattatgcgaagaaacgcttatcccttgaaagagcgctaaaataaccacttattatccaacatcattcaattgatttgatgaaccgcacttaacgcgtttgttttttacactgcacgattcataaactattacaagttactcaacgccaatatgatgaatcaaactgactggccaaccgatatcgccaaacttaactttaaatgcagaattcatctaagctcaggcacaaatccgtgattaatctgacgattatgccagattttaattggtaaatacgcatattaacacatcttagccttaaaactcacatatcaaatcgttaaaaaaggccttaaacgttgatataccagcttttaaacggaataaggatctttaggttgctgtgcagatagtcgaataagaccatctgatcatcagttcgcggaacggtttgcaatacagcggaacggtttgcaatacagcggaacggtttgcaatacaagtgttgttaaaattatggttttaacaacacttgtagtattctcacctcatttttgctaaactatctttaaactgctaattaaggagtcttccatcatggatcaacaacgttacttagaactctgcgaaaagcaactcgccaatcttccggattacattcgtaaattctacattaaccgccaggcaaacgcctactcttctgcaacgctctatcaatacttacaagaatacgttcgctttttcacctggttagttgatgaacagatcgtcgtggtcccctctatcgaccagatgccactgaccgcactcgaaaaaatgaaactcgaagatattgagctctacaagatttttctaatgaataagcgtaaacaaaataaccataagctctcctttcaagccgttaaccgctcgattaacgcattaaatgcgctctggtacttcttaaccattgaagccgaacaagctgatggtgagccttatttttaccgaaacgtcatgaagaaggtgaaactacttaaagcttcagaaacaatggcgacacgttcacgacacatcagcaaacaactgctgaccggtgaaaagaaacacgacttcatcaccttcatgcaagttgattaccctaacttgctttctaatcgccaactggcatcatacaagcaaaattgcgaacgcgatattgccatctgtgtactggcgctggcaacgggcatccgactatcagagttggcccaagccaacatcaacgatttgaatcttgaacaacttacaattaccgtgatccgtaaaggcggacagcaagatactgtcccaattgctccgtggagtttaccttttttaagggattactgccagattcgtaaatcacgctatctaaaagaagataatgaacaagccttatttgtcagtcgctatcgtggcagcgccaagcgtatgagcaactatgccattgaaaagttagtcgcgaagtattctgaagcatttggcgtgcgtctcacaccacacaagttccgccatacacttgccactgatctcatggcggcaactcatagtgaaacaattgttgcgacccaactaggccaaacgaccacgcaagctactcacttatatacgcacgtcgttgctgatgaacaacgctcggcaatggaccagcttgaatagccactattagtgctcttcttggcaacgattatcaatgtcgttctaacagtcatttggtttacatcaattcgtcgatttacacattgcttgacttataccagctatcgagtatactgaaagcgttcctaaaaattaaatgttaaccatcgcaaaggggagccattggctgagagtgattttaatcagacccttcgaacctgtttgttaagacaagcgtaggaattgtgatggagttgaaatgataactccttttttgtgttggttgaacaagaaaaggggttatttttatgcaacatcagcgtctattgattcagattgaaggggcaatcatcgcggcatttgccgtggcattggaatacatcccccatacagtggggccttccgcaatcgaagtctcctttgggattatccctattgtaatctacagtttacgccgtggtgccattcctggaatggtctccggcttaatctggggtctactagacttaatcttacgtggattaggaaacggtagtgtcttgaacgtatggcaaggattgctagaatttaccattgccttcatggttgttggtttagcaggtatcttacaacgacctattcaagcaagtattcaaaatcatacaaaagtcaaaacgatgacccttttatggatggccgcattttttggtacttttgcaaaatacttctgccacttcttagccggtgccgtttattggggctcatacgctcccaaaggtatgaatgcttggctatactcgctcactgttaacggtggcagctttatcgctagcttcattctaaccggcatcgttctatgtatttgtttagccatggtgcctaagttatatttaccaaaagacatggttttacacgtacaatctgaaaaataaacaaaaaaagagccgtattaacacttgaatggtgttaatacggctctttttaattcccttaacgatccgttctagctcgtaatgcatataagattgaaactgtatcgacaacctcttggaataaagcccccactaatgctggaacaatcccggtgctggcaatcaacattaacccaatacagattgcaatcccaatcaaaaccgcctggcgagcaacgcgcatcgtgtcacgcgcgatttgaacggcacgactaacccgtcctaaatcatcttttagaatcaccacatccgctgattcacttgcggctgttgcgccatgggcccccatcgcaatcccgacatcagcacttgccagtgacggtgcatcgttgaccccatcaccaaccataattagtgggcgttggtcttgcggtacttgttcaattaaatgaatcttatcgactggcagacagcctgcatggacgtcatcaattccgacttgttccgcaatctggtgcgcagttgtcgcttgatcgcctgtcaacatcatcaaacgcgtaatccccagttgatggagcgtctgcatcgtggccggtgcttctggtcgtaaatgatcgataaacgtaatgtaccccgcatattgatcattgatcgcaacgtaaacagtggtttgttcttgcagaggctgttgcgcatctggcgtcacgaattgatgtttcccaacacgaaccgtttgtccagacgacagcgtcgcaactaccccagcgcccgttgcttcttttaatgtttcaattggttgtaattgttctacctgtgccgctttaacaagtgaccgtgctaaaatatgcgaagattcttgctccgcactagccgccaattgcaataaatcggttggtgcgataccaatcactggcacaacttggtcaaccgtcaattgaccattcgtaattgttccagttttatcaaacgctgctgatttagcagacgctaatttttcaattgttgtgccagccttgacaataatcccgtttcgactagcacgactcatccctgagattaacgcgataggcgctgccaatattaatgggcacggcgaagccacgacaagcacttctgcaaaccgtactggatccttagataaccaccaagctactccagcaatcacatacgcaactaatgtaaatggcacggcatatcgatcagctaagcgcacaaaatgcgctggttgtgccgcagaggtctctacaagccgtacaattgcttgatattggctattaacggctaattggtcaacttgcatggtaaccgacgtatcgccgttcacagagcctgacatgagctcattatttagtgctttttcaacggggcgtgattcacccgttaacgatgattcatcgaataaagcacttcctgcaataatatgcccatcaacagggaccaattcgccaggtttaataatcacttgatcaccaacttgaagcttatcgactgaaacatcttcgaccgcatcattaacaaggcgatgcgctgtttgcggagaattatcaagtaatgtctttaactcacggcctgctttatgcgctgcatagtcttccaatgagtcgccaccagttaacatgaccaagaccattagtgctgcccaatattcaccgaccgctaacgtcgcaataatagcggtaatcgctaatagatccaccccgtattgaccagattttagcgttttaatcatctcaataaacatcgagagcgctactaagctccccgctaaactcactaaaatctgtgcccacaatggctcatgtagcaaaaacgccaagcatagcgcaatcacacccacactaattgttaaggcaaacttgatggtatgtttcatcgtcaatcgctccttcttgtgaattcatttacattataacacatttttagttagattagaataattccaatctgatggcacacaaaaaaagccccccaaattaatgagggggcttttttgcagatagttggtttataatagcagtctgcacggcagtcatcgctgctaataatagagtcattcgttttatcacgggtgatgttttttttgattagagagtgctttttcagttttatgaataatcgattcaatcggggcttgtgcctcgactaaggcttcgactgttatgtctgtgtgcccgttcaataaatcacgaccaacttctaatgcgtaaagcctattttttaataaagtaaattgagccgaacccgctacaaacttcagctgactcttttggcaatttcgaatggtcgcttcaatcacttgaattgcatcaatgctttcctcggtcatttacctatcctcctaataaaaaaataaagccccgaaggactttattattaatcgttattaaaatgcttctgttaattgtggaaccacttgtttcttacgtgaaacaacaccggctaattgtgcacgatggttgttcaattttacgttgaaagctttttcaaaggcttctgctggttcaccgataacaagcgcttctgagttactgtttaagatgtcagtaatcaaaagtacgaataagtcgtaaccattagctttgttgtctgcttcgatagcagcttcaaaagcagcttggcgtttgaagaccgcttcgatatcaactgtattcacttgatcgatacgcacttttttaccagccatatcgaatgttttagcatccgcttcaattaattcagcttcgctcttatcatctaagttagtgcccgcttttaacatttcaagaccatatgattcgaaatcaatatcagcaatttcagccaatgtcttaatcgcaatccgatctttttcagttgttgtaggtgatttcatcaacaacgtatctgaaatgatagcactcatcattaaaccagctaattgagctggaatttcaactttgttttcgttgaacattgataataaaattgtgctggtacagccaactggttcagcgcggtagaataatgggctgactgtttcgaagtttgcaattcgatgatgatcaacaacgtgcgtcactgttaaatctttgatatcggcaacactttgttggctttcgttatgatcaaccaacatcacactgtcaacttcactgcttgcttctttaatgatgcgaggggttgctgctgcaaaatgacgcaatgcatagcttgtttcttcattaggttcacctagcgcaacggcttctacgtcgtttcctagttgttgttgaagataagcaaacgccattgccgcaacaattgcgtctgtatctgggttttggtgaccgaatactaattctttactcatatttatacagaccttccttttaaaaaaataacatcctaattataccaaaaatattagacgattctacggttttgctctctaatccgtgttaaataatctttttcttctaaataatggtcgaattcacggaaaaagctattaatccgtggaatatcttccttttccttgcggaagacaaaagctaattcgaactgaatggccggatcaaattgaaccgcgtttcccttaagtcccaaattatgtgcttcataaaaactctttggtaaagctgtacttaattcagttgcttcagcaaaacgcatgatttcaaatggtgatgtgaattgagccgcactcactggacgatcaaccaattgattcttataggcttcactgatgaattgatttaaatagtattcatctgggtatgtcacccatttattatctaatgtatctttaaaacggatcttcttacgcgtctttaaagcaggatcttggctgataaagagtaagcgttcatccacaatcttatgtgacttataaggtttccagttcttaatgctgtcatctggcaaatacataatggcaatatcaattttattattttcaagtcggtcccagatttctttccgagtcaataagtgcatgctgacttcgatgtcaggaaattgtttatagtattgaattaagaaggattggataacactgatttccatcgatgctaaaatcccaatattaatcttaccgcgcgtcgcactcgttgaactttgaatttcatccgtcgcagtatttaataaatcatgaatctgatgggtagcatccaacatcgtccgaccagcatccgaaatatgtaacttcttgccgactgaataaaataaaggcgccccgactatccgttctaattttttaatctgttgggttaaagcaggttgcgtgataccgagtagttgtgccgcttgggtataattcatcgtttccgctaactgtaggaaataggttaatgttttagaggagaagatattttcttgtcttgttttcattttcaaatctccgttctttagtttacgcctatcattataataataaagatataaaaaaagagcaacccctttcgttgctcattcttattaaaggcttaaaattttcttatgttagcgttgctgctttggatagtctgctgtatgcaatagacgctccgcattgacaacgcgatcgtgggtcggtggttcaatccccgctaacggatatttaatccccatcttttcgtatttcacgattcccatcgtatggtagggcaacacttcgactcggtcaacattgtttaacgtttgaatataatcccctagacgagtgagatactcatcgtaatccgtccgttctggaatcaagacgtgccgaatccacatatgatgaccatgatttgacatatattcaatcatttctaaaatatgttcgttagaaaagccggttaactttttgtgccccgctggatcaatatgcttaatatcgaccattgaaagatcggtatatttcatcaattctttgaatttactaaagaagggttctttatacgtaaacggctgcccacaagtatccaaacaggtattaatcccttgtaccttacactttttaaataaatcaattaaaaaatcaatttgaattaaggattcaccaccgctacaggtaattccgccatctttaccccagaaggccttatatggcagtgcctttgcgattaattcgtctgcggtataagcttctccgctaccaatattccacgtatctggattatgacagaattcgcaacgcatgcgacagccttgtagaaaggcgacaaaccgaattccgggaccatccactgaaccaaatgtttcaatcgaatgaacatatccaattggcacctctggtgttatcggggtttctggaacaacattttcagttgataaccgtgttgtaaatttaattgccatttcactttcacctcttaaaagaaaagctatgctttctggtaaagtcgttaattcgcgttaacgaccttaccagaaagcggatattgctatccactttcgttagattacatttcgtcaaagaacgttcttgagataacgtcgtcttgttgttccttcgttaaatcagcgaagtagacacaataacctgaaacccgaaccgttaatgttgggtattcttctggatgttgttgtgcatccattaaggtttgcttattgaagacgttgatatttaaatgcatcccttgattaatcatgtaaccatcgaccatgttcacaagcgcgtctttacgtgcttcatcatcatgccctaatgtatttggtgtgacaccaaacgtatttgaaatcccatcagttgcataacggtatggaatcttcgcagttgaaagtaatgatgctaaagcaccgttcttttcagcaccgtatgctgggttagcacctggtgagaatggttcgccagcttgacgaccatttggtgttgtcccagtattcttaccatacacaacatttgatgtgattgttaaaacagatgttgataattttgagccacgatataaatgatgcgtattcatcttcgtatagaaagtcttcactaaccatttagcgatatcgtcagcgcggtcgtcattgttcccataacgtggatagtctggattttgcgcttcgaaatcgactgccataccgtcttcatcacggataactttaacttggccgtatttaatcgctgagattgaatcaaccgcatgtgatagaccagaaataccagtcgcaaatgtccggtctaaacgactattcttcaatgccaattgtgctgattcatagtaatacttatcatgcatgtagtggatggtgtttaaagcattaacgtaaacgtctgctaaccaatctaacatcttatcgtatttacccatgaattctttgtaatcaatgatttcacttgtaattggttgataagctgggccgacttgagctttgcctaattcatcgatcccgccgttaattgcgtaaaggattgtcttagccaagttagcacgcgcaccaaaatattgaacgccgtctgcaattggttgtgcagaaacacagcatgcaatcccataatagtcactcccccattcattacgcatcaaatcatcgttttcgtattgaatcgttgaactcttaattgaaacttctgttgcatagcgcttgaaaccttctggtaagcgatctgaccaaagtaaggtgatattaggttctggagcagcacccatattttccaatgtcttcaagacacggaaggcagtcttagtgacatgatgacgaccatccataccaatcccacacattgataatgttgcccagattggatcacctgagaataatgaattataatcttctgtccgaatgaaacgaaccatccgtaacttcatgacaaaatggtcaaccatttcttgcgcttcagcttctgtaattaagccccgctctaaatcacgttggataaagatatccatcgttgtatcaatccggccaactgacatcgcagccccgttttgtgtcttaatagcggctaagtaaccgaagtaaatccattgaattgcttcttgggcattcttagcaggtcttgaaatatcaaagccatagctagcagccattttcttcatatcttgtaaagcacgatattgttcattgatttcttcacgaagacgaatgacatcgtctgtcatttcaccgtcgccaacaccattaaagtcacggactttttcttcagctaaacgatcaatcccatagactgcaatccgtggtaagtcaggaataatccgaccacgtgcataggcatctggaaggcccgtaataatcttgtagtgacgtgctttacgcatgtctggtgtataagcatcaaaaacaccttgattatgtgtcttgcggtattcgttaaaaatcttgtgttgttctggatcagtcttaaagccgtatgcttccaaggcatcttcggccatccgaatcccaccaaatggcatgaatgcgcgttttaatggggcatcagtttgtaatccaacaatcttttcaagatccttgtttaaataaccagggccgtgtgacgtaactgttgcaggattatcattgtctgcggctaaaacgccacctgcttcacgttcttgtttcttcaattccattagttgatcatttaacgttgttgttgcttcggttggaccagctaagaaactttcatcaccgtcataggcagtaaagttttgttggatgaaatcacgaatatcaatttcatcttgccagtcacctttgttaaagccgtcccaatagtcggctaagttaattttttcggtttttaccatgtggattacctccattagtcaagtgttgtttatcacagttttcacaattttagtataacacatcacatagtttatgcaagccctttctttttgattgtttagaaactcttaaactcttttgaaagattgatttatagctatttatctacttaaaatatttttataaccccaccatttaaattgtgcaaaacttattttgctgttatagtacaaaaccaaaaaatccgcatattatgtataacagaaaaaagcaagtcatcacatagatgacttgcttttttattattttgactcgtcttcatttttaactggaatagtcgtttgaacaaatgccggttgtccaacttcatcaacatccatcacaaaactaccgttcgaataacggtcggcagttgcatgttgataagggttaattgcaatcacttcttgctgatcagtatgaatcagtaactcgcttgcctgctcaacactaaccattgctgctacccgatgtggttctttcttcaattcacggagaattaagaccccacgacgcgcacgacttgttaaaccaacctcacttaagagcatccgtttaaaggcgccccgttgcgtcacaatggcaacggctgcatgtttatcttctggatgatataacgtaaagccggtgacaacatccccatctttgagatccattaatttgaccccactggccttagcacctgatacagagacttcagataaggtaaaactcaatccataacctttatagctagcactaaagacggctagcccttcatcacttggaatccagttcacgtttgtcacatgagcatctgcatgcaacttaataaagtcttgtgccttagaacgatatgttcgacttggcaagaggtcagagaaggcagtttgtttaatatagccatcatccgtcccaatcacaaaatagccagcctgttcatttggcttaaaggcaaatgctgcaataaccgcttcatcagccgccaaaccaatcgattgcgaaatatgttcgcccatttccttccatttcaaatcagcaatttcatgaactggtcgttgaattaaatgtccgtaattggtgaacatcatcaattgatctaaggtttgtagtggcttttgtaaaatggcaaaatcgccgtctttcaaaccgctgtcggccccttcagatgcttgatacgagcgcaaactactacgtttcaagtagccgtcatggctaactgcaaccatgacggtttcgtcaacaacagtcacacttgtatcaatttcaagcgtctcaatttgtgcttcaatttcagtttttcggtcactccgataagttttgaccattgcttttaactgcgccttaatcacccgtgcaagtgcttttggatcaccaagaatcatccggtattccttaatcgctgcatcaagttcagctgattcttgttccaaagcagtcacatcggtattcgttaaccggtataattgcagtgaaacaatcgcttcagcttgggcttctgtgaaggcgtagcttgccactaaattatctttagcgtcttttttattcttgctaccacgaatcgtcgcaatcacttgatctaaaatcgagagcgccttgattagccctgcgacaatgtgctgacgatccaatgccttttgtaaggtatattttgtccgccgaatcacgacttcttcttgatgttccaagtaggcatggaggatttctaataagccaacctgtttaggttgcatatgcgagatggcgaccatattaaagttatatgtgatttgcagatccgtatttttgaacagataattcaagatcccttgactatccgcttgctttttcaattcaacaacgactgataagcccatccgatcactttcatctcgtacttcagcaatcccatcgaccttctttaaaacgcgtaattcatcaatcttcttgaccatcatagccttgttgacttcataaggaatttcgctaatcacgatttgttcccgattgccgcgtaattgttggatgctggtttttgcccggacgacaactcgaccgcgaccagtttcataggctttcttaatcccatcgaccccttgtaagatcccaccagttgggaaatcaggtcctttgatgaaggtcatcattttttctaacgttgcatcgggatgatccaatagatagaccaagccatcagtcacttcacctaaattatgtggcggaatttcagtcgcgtacccagctgaaatcccagttgccccattcactaagaggtttgggaaccgagctggtaaaacagtgggttcttcagcggtatcatcgaagtttaaaacgaaatcaaccgtctttttatcgatgtccttgagcatttcaccagcaatcttacttaagcgtgcctcagtataccgcattgctgctggtggatccccatccattgacccattattcccatgcatttcaatcagtggttcacgtaatttccagtcctgacttaaccggaccatcgcttcataaattgaactatccccatgcggatggaaattccccatgacattcccgacagacttcgctgacttccggaaccctttatcataagtattcccatcgatggacattgcgtataaaattcgccgttgaacgggttttaacccatcgcgaatatctggtaacgcccgctcttgaatgatgtattttgaatagcggccaaagcggtcgcccatgacttcttcaagcgttagctcttgaattttttgtgcttcatcagccaaatttaatcactcacttttctattcgtctaattggtcaaataaatccacttcagcgcttgaagttgtcggtgctggttgaccattcgttgtatctaagatgctaccatcttcagccattgtgaacttaacgttttcttcaatccacttccgacgtggttcaactttatcgcccatcaacgttgtgacgcggcgttcagctaaggctgcatcatcaatccgcacccgaattaacgtccgactcgttggatccattgtggtatcccaaagttgatcagcattcatttcacccaaccctttgaaacgttgttgactgtagcctttacccatttctttagcgacgactttcaattcatcatcagtccaagcataggcaatcttcgtttttgccccagcacctttttggagcttatacaatggtggcaaggcaatgtagacttttccggcttcaattaacggccgcatatagcggtagaagaaggttaacaacaaaatttgaatatgggccccatcggtatccgcatcggtcatgatgatgactttatcgtaattgctgtcttcaagtttgaattcagccccgactccggccccaatcgtgtaaatcatcgtgttgatttcttcattttttagaatttcttgtaatttcgctttttgggtatttaaaactttgccccgcaatggcaaaatcgcttggaatttccgatcgcgcccttgcttagcagaacccccagcagaatccccttcgaccaagtacaattcattcttcgccgcatttttcgattgcgctggtgttagcttcccagataataagccatcggatttcttctttttcttaccatttcgactttgttcacgtgctttacgcgcagcttcacgtgcttcgcgtgcttttaatgatttacgcactaaggcttgcgcaaattcaccattttcaagtaagaaaaagctcatttgttcataaaccaaactatcgacagctgtccgcgcttgtggcgagcctagcttacccttggtttgcccttcaaattgcaagagttcttctggaatccggacagacaagacggcactaagaccttcacgtacgtcggagccttccatgtttttatcccgttctttgagcaagtttaccttgcgggcgtaatcgttaaaagctttggttaagccggctttcatcccagcttcatgggtcccaccatcacctgtccggacattattcacaaatgacatgatgttttcggagtagccatcgttatattgacccgcaaattcgacttcaatgtcttctttggtgccttcgaaatataacttattaccaatcgtatctttatcttcgttcaaataatcgacaaatgattgaatcccttctgggtaatggaagacatcttgacgtgctggctcagcgcgtaaatcggtcaacgtaatcttgacatctttgagtaaaaaggcagattcgcgtaatcgttctgctaaggtattgtagttataagtagtcgtttgaaaaattgtcccatctggcttaaacgtaattaacgtgccgtttggttctttagctttgccaacttttttcaaggtaccaaccgggtggcccccattttcaaagcgttcttcgtaggcaacaccatcacgcacaacgcggacggtcaaccattcggataaggcattgacgacactcgcgccaaccccatgcaaaccgccggatgttttataactgttttgggtaaatttcccacctgcgtgaagcactgtcaaaataacttcaatcgtaggaatcccagattggtgcatcccagtcggcatcccacgaccatgatcacggacactaatactattatccgcgccaattacgacgttgatttctgaaccaaaaccagccaaggcttcatcgacagcgttatcgacaatttcgtacaccaaatggtgcaagccgcgaccgtcagttgagccaatgtacatgccaggccgttttcgaactgcttctagaccttctaagacctgaatcgaattatcattataatcttgtttttgatttggcattcaagtatgactcctttgtttaaaaatgaacagataaggtatattatcaacaagtttggatgattttacaatcaaaaatttaaaatttcttgccaatacaaatgtatgttcgtattcacctattctaacatacaatattccttttcccttgtcaaaatgctaaaataggggaaacaaatgccacaaataggagtttttgtcatgaaacttagtcttatctttattcttgcgtacctgatcggttcgttcccatcaggcgttattatcggccgcgttttctgtcacaaagatccccgagatgctggaagccataatatcggcacaactaactcgtatcgcgtgctcggcccaatcgctgggacagccgttttatttcttgatattttaaaaggcacacttgctgctagcctaccgatgatttttcacatccccaatcatgcattggtcttaatcgtcggcttagcggccgttgtcggtcatgcttactccatctttttacactttacggggggaaaagccgttgcaaccagcgcaggcatcttactggcatacaatccacttttcttcgtaattgccagtaccatctttatcagtgtcatcctgattacaagtatggttagcatggctagcatcctcggtccattgatgattgcgattttatcgttttacacgcatgattggctactcggttcgattgcgaccttggtcttacttttcctggtctaccggcaccgcgaaaatctacaacgcattaaaaatggcactgaaaacttagtgccatttggcctgtactatcgctataaacaaaaacatcaataactaaaaaaacgccgaacgggcgtttttttgtgcaatcagttaaagatcaatcaattgttcccgttcattgtaaaatgatcgataagctaagtaacacgcaatcactgaaccaagactcgttgccgataataacataaaggtcactaatatctggtacataatggccttgactggatcaattccggcaaaaatcaggcccgacatcatccctggcaggctgacaagccccatcgttttagcggaatcgatcgtgggtgacatccccgtacgaatactctcacgaataatggcaattgatgcttgtttagcggtcgctcccaaggcgagtcgttccaaaacaggttgccgttcatccttaaattgcgccagtaagctgcggtaactcaagccaatggcgaccatcgagttggaagcaatcatcccagtaattggaataatttgcgatggaataaacttaatcgccccagataaaacaagtaatcctaacgtgaccccagtacttgttaaaattgcgataaatgaaattggaaacccgttgcgtagtttccccgcccgctttttggcatttgctgcggcgttaaaaataatgatcagcatcatcaataacgttagccacacatcgttaatatgaaaaatgaatttcagtaaataaccaacgataaataattgaatgattgcgcgaaaaacactgataatcatatctttttcaagaccgattttttcatggaagctaatgactaatgcgacaaacactaatgtcacagcaaacgtcagtgaaagaccattaacggctaagttcatcttgatttaccaattcgccagcaacaatttgcacctggcgccctttccgttgtaattcttctgtatcgtgggtaatggcaataattgtgagcccgcaatcctcattgaggtgctggacaaacgccaatacaattgccttattagcggcatctaaaccagtcgtaatttcatcaagtaataaaacttccggtggaaataaaacattacgaatcaaggcaattcgttgcttttcaccgcccgataacgtggtaatttttttcgttagtggcatgttggctaacccaaccgctgccaacgctttttcaattgttgccatatcgaccggtaaattacgaatctcgtatggaaaacgtaaattatccccgattgtttcaccaaataacgttgcttgttgaaaacaatacgaaaccttttgtcgatactgattgggactaaactgggtcagtggctgatcatttaataaaatggtgccacttgtcggcgttagtaagtccgcaattaaccgtaacaaggtactcttaccacccccagaaggtcctgtaatcgttaagtaactgcctttttcaacggttaaattaatgtcggttaaaatcacttgttgatcaacctgataagataatcgttcgatttttaattgaatcataagtccctcctgacaattatttaattcatagtatacacgaaattcacttaattagtgtcttctgctgattgaaaaaaggacacctaaaagcttatactaatattaggatatattaagtgatggacgttccgtccgctctggaaaagagatgttgataatgttaaatagctttccgcaagtcatgacaattgccggttccgattctgatggcagtgccggtgcacaagcagatttaaatactttttttgcccgtaatgtttatggtatgagcattttgacagcctgtgttgctggaaattcatatgggattcgtgctagccaagcactgtctcccgactttattgatgccgagtttgaagcaattgcagccgactttcaggttcgcgcttgcaaaacaggaatgttaaccgaccgtgagaccattctaaccgttgctaatcagttgaaaaaacatgactttggtcccctagtgttagatccggtcattattaccaagcatgaagcattgttgttggcagatgatgcttttaacacactaaagacagaattaatgccccttgcaactgtcctaacgcctaatttctacgaagcgcaaaaattaactggtattgaactgaagacacctgctgatttccaagctgctggccaagcactattggcaatggacgcaaaaaacgtcatgattaaaggccatcacgaggccggacaatcaatcgttacagactacgtttgccttgccgatggacaagaattttggctatcagaaccttacgttgaaaccacccatattaatgggacgggcgattcactttcagcttgcatctgtgctgaaatcgctaagggacagacaattgaggctgccattaagaccgctaaacaatttgttcaccgcgccatcgctaacccgattgaagtcggccacaagtacggtccaattaaccaccatgcttaaaatacaaaaaagcccacggatttttccgtgggctttttgaatgtttagtgttctgcttcttcaatatcggcattgacttgttgtaagtcaaagtcactctttaaaaaagcttcgttatcacttgggaagtgctgttcaaacgtttcaaacggttggagcgtcatttgagcatcgaccacggtatagtctagaatatgaccgccaaagtcgtgcgtatcgtttaagaagtgtacgtgatagcctgcaacagctgcgccttgataaagcgctggtgcataatacccaatcaacgtgcccgttacgtctgtttgttcaaactccggttgcactcgggttgcagcagtcaaattcggataaggttcctgttgtgtttggacggcccgcgtatgcatgactttgaaagtcccagtcattttaaccgcaaaaaacaagttttttaacggtgcttgcgctagaatttgcgtttctaactcagcctttgtgcgttgatgaaccgcttgtgtaggtaatgatgaatcttgccaatgcactgtcgcaaatggaactgtcgcatcaggtgcgagttcagtcacttggccatccccattcacagtataagcatggccatctaataagaccagttcgccagctaaaccgtgcgccgtcccgattccaaaattcccatgggttaataattcagcaacggtcattgtccctgtaaagagccccggaattaatagggctaacgttccgtgttgataaacgcgtttgacatcatttgtcattgattttcctcctcaaattaaacgagttggtcaggtaataatgcttggcctaataattgattatctttgtaatcaacgggcacatctacaaggacgggaccatcaatggcaaaggcttgatccaatactttaccaagatctgcggctttttcgacccgtaacccggttgcaccaaaactctctgcatattggacaaaatcaacgggaccaaacttaacggccgctgattcgccatatttcatttcttcttggaattttaccatgtcataataaccgtcattccaaataatatgcacgatgtttaagttcagacgcaccgcagtttctaagtcttgacctgagaataagaagccaccatctcccgaaaccgacacaatttgtgtatttggccgcactagagcagcactgatcgcccatggcaatgccacacctaaggtctgcatcccgttactaaagagcaagtgccgtggttcgtaacttctaaaatgccgcgccatccagatgtaatgactaccaacatcgaccgtgacggtcatttcgtcggtgacccgtgcttgcagttctgaaataatgttcaacggatgactaagtggattatcggtcgtcatttcaggtgccgtgtcacgttgattgagttctgcgtgcaattcaactaaataatcacgcacatcgcccgctagttgataccccttcatataaggtaataaaaagtctagggtctgcgcaatatcgccgaccaattctttttcaggttggaaattatgatcgatttcagtgcgcatatcatcaatcaccataatgtgcgcatcactttcagcgttccagttacgcggttcatattcgattggatcatagccgactgcaataacaagatcactgcgttttagaatgcggtcgcctggttgattccggaataaaccaactcgcccataaaaatcagtctctaaatcacgcgaaatgacaccggctgcttggaacgtttcaacgaccggaatgtgggtttcagccactaaattgcgaatcgctgctgtcacttctggtgaagaagcgcgcataccaactaaaagtactggtaattttgcttctttaatccgttgtgccaaaagcgtcgtttcaacgggactggctggccctaatttaggcgccattagcggtttaatcactttagaatgaacttctgagtccgtgacatcttgtgggatgctgacaaacgttgcgccctgtttagcggattcagcttcttgataggcgttagcaatcacttctgataaattctcaggttcttggacttccgcactgaattttgtgattggtgcgaataaagcggcattacgcatgctttgatgcgttagtcgcaacaaatcagcgcgtttcacttgaccggcaatggctaagactggatcaccttctgccgttgctgtcacgacccccgtcgctaaattactggcaccagggcctgaagtcgccattacaacgcctggtttgcccgtaatccgaccaatcccagccgccatgaaggctgcattttgttcatggcgcgtcaaaattaatttgggcgtctttggattaacgggatgttctagtcgttcaaaaacccgatcaatcttcgcacccggaatcccgaacacgtactcaacatcatgatttactaaactatcgatgatggcatccgcgccgtaatacttcttttcttcagtcatgacttaccctacctaacctatgattttataacttatatcttagcatggaactactggaaaaactagcagagtgcgtttagaatgcgttacccgcctacagccagtttactaaaaaaacgcactcaccatcttggtaagtgcgtttttttaatcattcattaacgaacagtaatttcataacttgcattaaacgtttcacctgcagccagttcgttgacaccaaatttttctgaaagttcaccgcttgcgtcaacggtatccgcaatcccccaccaaggttcaaggcacacaaggttgccttctgttggataaggtgaccaaacaccaatgaatggggcgccagccaatttcatggtcactgagtggtccgttttttcagaacgaatactgaattcattggcttgaccctttaattcgtagattaaggcgtcatttttaaataattggtgattgatatccgttgcgacgtcggttggtgctaacgtccggtcgttcaaattaatgaaggccccttgcaatgggatcttaacccgtgatttttgtgggcggtagtctaagaaataatcttcaaattgcgtgtcatccgttaatgggactttaaatcctggatgacccccaattgagaagtacattggcccgcttggcgcaacattgcggacgtcatagccaaccgtcaaatgcatatcatgaacacgatagctcacacgtaattcaaattcaaatggatacacggcccggctgtcagcgtctgctttcaacaagaaagtcacggcgtggtccgattgttcttcgatactgaattcgcgatcacgtgcaaaaccgtgttgacccatcggataggtttggccattatacgtatattggtctgcttttgaacgccccacgaatgggaataaaacgggtgcgtgccggccccaaacatcgggatcagcttgccataaatattcaagccccgaaacggcgcccttaatactttgtaattcggcgccttttggactgagggtcaccgttaaaaattcgtttgcaatttggatcatcttaaaataccaccttttaaaaattatagaataaagcgggttaaatctttatcggctgcaatattaccgatcttatcgttgacatattgttctgtgatggtgatatcccccatctgcatgtcaggaccttcaaagagaatatcctctaatagcttctctaagatggtggccaaacgacgcgcaccaatattatcggtatcatggttaacttggaaggcaatcgcagcaatgcggccaattgcttccatcgtgaaggtgacgtgcaccccatcggcgccaatcaacgccatgtattgttttacaagtgcgttgtttggttccgttaaaattcggatgaagtctttttcagttaaatcttcaagttcaacccggattgggaaccgtccttgtaattcagcgattaaatcgctgggttttgattcagcaaacgcccctgaaccgataaataagatatggtcggtcttcaaaacaccgtatttcgtattgacttgtgagccttcaacgattggtaaaatatcacgttgaaccccttcacgagagacttcaccagattgttttttgccaccagccgtaattttatcaatttcatcgataaaaataatcccggtattttcagcacgttggagcgcatcatggtaaatatcggcatggttgactaatttagcggattcttcttgaatgaaaacttcacgcgcttctttaaccgttaccgtccgcgtaatttttttcttcggcataattgaacccagagtatcgtttaaatcaattcccatctggcccatcatatcgttcattggggcaacttttttcggttcatcaacttgaatttcgatttcccggtcatctaacaagcctttatctaactgttctttaacagataaccgttcgttacggatatcatccgtcacttcttctgattcagtttgtccgaaaccagctggtgtttcccctttttgaagcgcgttaaacatgttcattaaatcattcatgttgttattgttcttacgttgttcctttttaatgcccggtactagtagtttaaccaagcgcttgtctgcttgacgagcagccttagcacgaacgtttttaaattgttctgtttcttccatatgcacagccacatcagctaagtcgcggaccattgattcaacgtcacgtcccacataccccacttcggtaaatttagtggcttcaaccttgataaatggggcatcgacaactttcgctaaccgtcgggcaatttctgttttcccgaccccagttggcccgatcattaatagatttttaggcgtgatttcttgttgcatttttgcactgagttgcatccggcgataacggttgtatagtgcaaccgcaacggcttttttagcttgatcttggccaatgacaaattgatcaagttcggcaacgattgttttgggtgttttattcattaagtccattgtgcgacctcctaaaatgattcgacaatcacgttgtggttggtgtaaacatcgattccaccagcaatatcaacactggttgtgacgattttttcaacggataagtcatcttttccttcaagtaataatgcggtagctgctgcttgggcgaaattgccgcctgaacccacggcaatcacttgatcacctgattccgatagcgtatcaggggtgatgacttcaccattccctgaaattaataaaatatcagttgcattgaccgcaatcaacatcgcttctaatttttgaagcgttggatctttacgccagtcttgcgctaaagcaacagcagcatgttgcaggtcgcctgaatacttttctaatttttgttcaaaccattcttgtagcgtaaaggcatctgcaacaccaccagcaaagccgattgcgacttgattaccataaattcgacggacctttttagcagaatccttcgtcacaaatttttcgcccatggtgacttgaccgtcaccggcgatagctgttttaccattatgtttaactgcacaaattgttgtcatatgaattactcctaacgttgtttggggattgggcggggcttaacgtgcttttcaaactaactttctgcgcttagcgctgtgaatcaaatcagcgactttatcgctaattcgcttccctgtgctagtgctcaaaagttgaacaagcttgaacgcacttacttttttcttaacgtgctttcatcaactgctttctacgctttgctacatctgtcatatcaccggcgttgccggtaatccgcctgattaggcaaatgctcaaaaacaacccgttgatgacgcacttctttcttaacgtgcttttcaaaccatgttcttgcgtttagctacacaagtcaaacaattgcttccagtaatcattcgccttgttaggctaattctcagaacataaccggtttgaacgcacttctattttagcagtctttaagactgtgtgctaatattagtctatttttcgttgaaaaaaatcaaactttagtccgagttttacgcgcggggaaagaattggcggtaatctttttgtaaatgggctgtggtgacatgggtgtaaatctgtgtggttgataaactactgtggcctaataattcctgcaccgttcgcagatcagcaccgtgatccaataagtgagttgcaaaggtatgccgaatcatatgcggatgaatgtcactcgttaaacttgttttcttgataatctgatctaaaatgtattcaattccccgacttgtaattggcgctccgagatgattaacaaaaacgacatcgtggtccaattgttttttggccatcaattgaacacgaccaacttttaaataagcttgcaaggcacgttcagcatggtgcccgaatggtacatagcgatctttattgccctttccatgaacaagaatgacgcgtaagccgaaatcaatttgtgctaccgtcaactgcgcgcactcactcacccgcatccccgtcgcatacagtaattctaagatggcgcgattccgttgatcgagtggttgatccccatcaatggcagcaaatagcgcgtccatttccttttcgtaaaaaaaccgcggcagcttatgctgttgcttttttaattgaacagcttcaaaaggatcggtttgcacgaactcatttttcactaaataccggtaaaacgaccgcaaactcgaaattcgccgcgcgacagtttcacgactatattctttttgatccatttcattcaagtaagtctgcacgtccagtggcgtgacctgtttaaacgacgctaagccgccgttagcggttaaaaaagcactgaacatctgaatatcagcttgataagctttttgggtttctggcgagtaatgccgatcgaccactaagtactgtaaaaaaagattaagccattcttgttctaacgccaaaaaaatccctccaagcttgattagtattactttaccacaagcctggcgggatttaaaagattctaattaaagtgtcgtcttaaattggtcgatactttcaagtgcgcgatcagcaagtgcttggttccgttcctttttatcgcgaatccgttgtttcaaaggttcgaaaatcccaaagttcgcattcatcggttggaaatgtttggcactcgtatgggtaatatagtgcgccattgatcccatcgccgtatccgttgggaaaacagccggtgtttggtccaacgccagtttagcggcgttaatcccagccactagtccagaagcggcactttcaacgtagccttcaaccccagtcatttgaccagcgaagaatagatcgtcacgttgttttgattgataggttggtaataaaacatctggtgatttcatgaaagtattgcgatgcatcacaccataccgcacaaattcagcattttccaaaccaggaatcatgcggaaaacccgtttttgttcgccccacttcaaatgtgtttggaaaccaacaatgttgtacaaactagcagccgcattgtcttggcgcaattgcacaacggcgtatggttgtttgccagtattcggatcttccaatccaacgggtttcaaaggcccgaataacatcgtcttaatcccgcgtttggccatcacttcgattggcatacagccatcaaagaacttttcttcttcaaagtcatgcatttctgcaacttcagcgctaatcaaggctttgtagaagttttcgaattcttcttcagtcattggacagtttaagtaagcagcttcgcccttatcataccgtgatttgaggtaaactttatcgaaatcgatactgttcttatccaaaatgggcgctgcagcatcgtagaaatacaagccatcactgccgtttaaggcactgattttttcagctaagccttcggacgttaatggaccagtggccacaatcgtaggaccttctggaaaatcggttaattcttcatgatgaactgtgacacgttcatgattggctaagcgatccgtcaccgtttgtgaaaacggtgtgcggtcaacggccaatgcgccaccagcaggaacggcattttgatcagccgcactgatgattaatgagtccaagtgacgcatttcttctttaattaagccaaccgcattggtaatttggttcgcacggagcgaattcgtacacactaattctgcgaattgttctgtatggtgcgccggtgtcattttaacgggacgcatttcatagaggtgcacattcacaccgcgttgggcaatttgccatgctgcttctgaaccggctaatccggcaccaatcacgtttacaaaaggttctgtgctcatttgctagtctccatttttctaattatttttggacggtttcttcgtagtcaccgtttggacaaattacttgtttgccacctttaattttcttttcaacaaggtagtgttcacacttcggacagtttctgccgacgggtttatcccatgtgataaaatcacaatctgggtaacgatcacaaccgtagaataagcgattcttcttcgatttacgttcgatgacttgccccttaccacatttgggacaggtgacgccgatttccttcacgattgccttggtattgcgacaatctgggaagcgactgcaagcgaagaatttaccataacgacccattttaacaaccattggggcaccacagatgtcgcagtcaaagccagctggttcatctttaatttgtactttttcgatttgttcactcgctttttcgacttctttttcaaacggtttgaagaagttgtcaatcaccttgacccagtcttctttacccgtttcgacttcatccaaacgatgttccaaatcggccgtaaagtcgatgttaacgatgtccgggaagaattcgacaattaaaccattgacgatttcccctaactcagttggttcaaagcgttttgcgtttaacttcacgtaataacgccgttgaatcgtttcgatcgttggtgaatacgttgatggtcgaccaacaccgttttcttccaaagccttaactaaattggcttcagaataacgtgctggtggctgcgtaaaatgttgcactggatcagttctaacgagtttcaccgcatccccaactgcaagttctggtaagacattatccttagcagagtcttcagtatcacgtgatgacacatagagtttcgtgaatcctgggaacttcatttgtgagccgtttgccttgaataagacatcaccttgagcaatcttaactgcgaccgtatcaaaaatggctggtgtcatctgactggcgacaaaccgtgaccagattaagttatagattttatattgatcgttagttaaaacgtctttcaagctcttaggtgtccgcatcactgacgttgggcgaatcgcttcatgggcatcttgtgcaccttcaggattcttcgtcttatgcgcctttaatgccgcatattcttcaccataattgtcatggatgaattgtgacgcttcatgtttagcaccggtagaaatccgggttgaatcggtacgcatataagtgattaacccgaccgtgccttctttgccaccaaggttaatcccttcatacaattgttgggcttgcatcattgttttccgcgttctgaagttcaacttacggttggcttcttgttgcaaggaactcgttgtaaatggtgcggctgcaaaacgtttgcgttcccgtttcttaacatcttcaatcgtgaaatccttagtcttatcgatttgtttcaaaatcgcttgaaccgcatcattatcgctaaggggtaatttcttacccttcacgccgtagaaactggcgttaaacttactgcgactctttttaaattccgcatccaatgaccagtattcttctggaacaaaggctttaatctcgttttcacgatcaatcacgagttttaacgcaacggattgaacccgaccagcactcaagccttttttaaccttttgccagagtaatggactgattgaatacccgacaatccgatcaagcacgcgtcgcgcttgttgtgcatcaacgagtttcatatcgatactacgtggatttttaaaagcacttttaacggtgtctttggtaatttcgttaaagacaacccggtttttttcagttggatcgagttttaaaatatgggaaacatgccatgcaatcgcttcgccttcgcgatccggatcggctgcgagatagatatgatcaacttttttagcttgcttttttaattctttaatcgtttcgcctttaccgcgaatcgagatatatttaggttcataattattttcaaaatcaacacccatttgactctttggtaaatcgcggatgtgacccttgcttgcaacaaccttatagttgcgcccaaggtacttttcaattgttttggcctttgcaggtgattctacaatgactaaatttttgcctgccatggacaaacccctttcaacagaacgctttgttcaaatcgttcattagcataaaacactaccttgacgattgtcaactgatagtatgcttgatattaacagcttaaagcatagcataggtttggcagtatgccaaagagaaattgttttcaaacgtacaaatcacaccaaaaatcggggttcaaccacttggtcgaaccccgatttcttctattatatagtcgccagataaaaaacttagactgacaaactatttttttgtgcatcgcgttcaagaatccccgcaataatttgatcaagggtgacggttgccatctccgcttccgcagctttttgcacctgatcataagccgcatcaagggttgcttgaatgttgctaccaattaaacaatctggatttgttttttcatcaacgtgtaataaccgttgatctgtatcaagcgcctgaaaaacggctaacattgtaatctgttccgctgggcgcgctaatttaggggcaatcgtccccggtttagtcgctaataaatccgccttcaccagtagtgacattagccgccgcactaaactaggattagactcgatgctcccagcaatcgcttggcttgataaatcaccatcttgaaaaatatcgacataggccaaaatatggatggcatcactaagtttatgagaatatttcatggttcaaccgcctttttgaaatcaattcaggcttatttaataatcgtctgtaacgcttcttttaatgaaggtaatggtcggcctaagacatcgggtaaatcagaaatggtttcatctaaatcaccatcttgaatcattgtttgaataccagtgacaatttcagcgacttcagcaggtaagccgttgtcttcgaggctttgacgataatcagccgcatctaatgatactaccttaaattcttgattagtcaactcgctaatcgcttgagctaaatccgcataagtggctggcgcaccggcaaattcataaatcgcttttggttgatcgttgactaataccttagccgcagcttcagcatagtcgtgttcgagtgcccaaccaacatgcccttcaccagcgccataaacaaatggttgacctgctaatgcgcctttaatgctatccatttcgttttcaagataccagttattgcgtaagaatgtatgatcaatgcctgatgctgccaatgctttttcagtttgaatgtgatcacttgctaaagcacctgttgcttgatcagcgtgtgggaaactcgtataagcaatccacttaacgccagcctttttagcagcttcaatcacggttaaatgttgttgcgcacggggcacatcgccaccaggttgtgaggagatgaataataaccggtcaacgcctttgagtgattccgttaatgtggcaacatcgttatagtcaccgggacgaacggtcacaccagctgggaccattttagtggctttttcagtattccgtgctaatccaatgatttgttctgctggcactaagtcagccaacgtcttcattgcgacttgcccaaaacgacctgtcactgctgtaattgcatatttcatattaaaaatcccctttgaattccatttgttactttataagtaacttgtgactttaatattaacaacatgccgcagaattgtcaacaattaaccctcaatcaaaataatgcaactcgtccaataacaattgttgatttaaaagcggcgttgcaccggctaaaatcagttgattacagcctgccgataatgaatgattaacctggcccggtaaggcatatacgttacgattggcttgtaatgctaaattagcggtgattaagctaccacttttttggcgggcttctgtgaccactaaactatgacaaagtccggcaataatccgatttcgggctgggaagtggtgcttcttagccgttacgtccaaaccgtattctgatatcaataaccctttttcagcgaccgcctgttgcaagtgttcgttttgtggtgggtaataacaattcaagcccgttccaatcacgccaatcggtcgtaaccctttttggagtgcaacttcatgcgccatcgcatccgccccttgagctaaaccactgataatcgtcgttgtttgtggtaatcccaataaatgctgcagggcttgcttagtatactccgtggcttgccgcgcaccaaccaccgcaacacatggctgtttcaaaacacttaaatcgccgcgataaaataaaactgttggcggacaatgggtttctaacaaccgttgcggataatctgcttctagaatcgtcagatactgaacataacgttcatgcgtggcacacttctgttgcagagctagactgtcaaaactagtctgaaaggtcagccaatatcgctccggtaaacacgcaatctgcgcaatctccaatgccgataaagcccaattgtgactcgttactaaccatgcggctaagcgtaattcactgatggggccaaacccatctgccaggtgtactttcaataataattgctttttagtcaacacaaaaaaacagctcctttacgtttatcttcgtaaaggagctgttttattttctatagggcgtctttaacgggcgaaaaactgcggcggtgaattggcgtaacaccgaattcagctaaaccagcgagatgtttcgctgtcccgtaacccatattattagcaagatcgtaacccggatactgttgatcataattaatcatcaattgatcccgaatcactttagccacaatactggctgaggcgatactaatactgcgcgcatcccccttaatcaatttttcttgtgggatgtctgtcggcacggtcattgcgtccaccaataggtaatcggggtgttctgctaaactagcgacagcttcgcccatcgccagttccgtagcgtgatagatattctcttggtcgatccgtggtgcatcggcaatcccaatgctgacactgatggcttgtgccatgataccgcgatacagttcttgtttcaccttaaacgaaagctgtttagagtcgttgacttgccataggtcaaaatcatgtggcaaaatgacggccgctgtcacaactggacccgctaatgggccgcgcccaacttcatcaattccagcaatcaagggataatctggccataaactttcttctagctggcgtcgttcgataaacgccgctttttgcgccgctaacttagccatccgcttgtcatattgaacgagtaacttctgcacgccagcacgcgcatcactgcgtaagagcgccacttcttcctctgaaatgtcgtctaataagcgtgccttaatggcagcaattgattctggtttggtcattagtgcgcctccacaggaacgatatcgagtgtaaagcgccctaacttacccttacgcgcgtccgtgatgaatttcatacagaagcgatcgtagtcttctttaaaacctagtcgtttggtcaatgccatgattaaatcaggcgctggcatttcaagttcagccggcgtcacatggtattcttttaccaattgttgcggatagaaatccttgaaataatcgagggcatacaccacaacatcatccgggtgataaattgcatccgaaatcgcaccagttaaggccaacttattgccgacagctggatcttcgaatttaggccataaaacccctggtgtatctaacaattcgagtgattggcccgcttttaaccattgttgattcttggttacaccgggtcgattacctgttaccgcaatgtttttttgcaccaagcgattcaaaatcgttgatttaccaacgttaggaaccccaacacacattgcacggatcaccggattaagaatcccttttgcccgttttttagcaagtttgtctgccaaaatttcttgtgctactttttcgatttgcggtaattttgatttatgttgcgcatcaagcgcgattgctgtaatcccccgttttttaaatgtttcaatccattgttgtgtgcgtttggcatctgccatatccgctttgttcataatcaagagcgtcggtttgttttgaccaagttctgcaatcatcggattaatggaagattctggaacccgtgcatccacaatttcgagaatcaaatcgactgctttgagccgttctttaatttgtttttgggcctttgccatatggcctggataccattgaattgtcataataactcctttattgctagttaagcgatatacatcattcttaatatttgtcactgattgtattattcttaattctatcatacctgatgtctggctgacgggttaaatttaattccggactacaacatccaccaattaagcgtatcattttttcagttaagcatcatattcagtacatttcatacgatcattagcactcgataatcaaaaaagctgacacactctagagtatgtcagcttttaattattattttaaagattgtatatctttaatcggccagtagaccgccactgctcggcctaatattgtatcgcggtggatcgtaccaaacaaacggctatctttgctaatctggcgattgtcacccaatacaaagtactcatcttttggaatctgtttttcgccgattaaggtttttaattcaaaatctgatgttaaaatccctggtttctttttggcctgattcaagaatggttcgtcgacatgccgtccattgatgtacagctggtcattgcggtatgcaacggtttcacctggcagaccaatcacccgtttcacataagttgtttgatcagctcgggtgaagacaacaacatcaaagcgcttgatgggcccactagtgcgtaataagagttggtccgctgactcaagcgtcggggccatcgattgccctgacaccgatgcggggaccagaatgaacgaccgtaacacaatcgctaccgtcccagccagtaaaaatgcgagaagccaatagccggtaatggcccatccccgccacaatttctgcttcggggaagtcattaggcttgttcgctttcctgataggcttcatacgcctcatcaaaaatcgtcatactcgggaggtagctgccattaagttccaaatagcgcgttaatgtttcataatcgccgctttgtttagggaaagattggtcaaaaaaggcattgttggcaaattggggaactggttcataattattcggatcacgttgggtcatgaggtaacgataaaaactctgcttcatctgaacaccttatttcttattttttagcgggatatagacgtttaaatcaatcttatcattcttcaaatcgatatgtttagcagttacttgcatcccgttttcgagcttgaactcatttaggcgtaatgtaatccggctcttgtgtgcatccaaaataacccatttggggaatttgtattgacgcttgatgtaattaaagacaaacgacatgggcaccttcaattgtccgactgctaattgtttggcgcgtaattggacgtcgccattttctaaaacgtacggttcaaaaaagaggttgaattcgaccggaaaccctaagaacttgaattgaccagataaaatcgcctgctgatccagggtgagttggtatttaatctttgaatcttccaagtagttttgtaaataataggtgactaaactattgatttgtctcttatgcatctgaatttcaaaagtgctatcagctttgatgattttctcagttttaatcatttcagtcttaggggctgtcacgttgtagccgacaagaccaactgtcccgatcacgactgctaataagacgatgaaactgtatttccaataattgatggtccgtttagttgttgttttctgtgctgcttgatgtgcttgtctggttgtcataacctatcctttctctaatcccacgtttgcttgtgtgctttcatcacttgccaaaaggcctttgtgacccattgataacctttatgattgggatggaaatgatcatctggactggtataggggttcaaatgctcgttagccgctaatgttttttgcaactgtgcactatccattttagcgagcgatttagtctgtttgacaaaatgcccatcgccccgtgtcaacatccgatcactattgacataatacgtatctttgaaatcattagcaaccgttttggcggtctgattccactcagcaaccgcctttgacatcccagtgatttcagggaaatagacataaaacggattgtagacccccatgatgaaaattggggcatcaggattatattttctaatttgcatcatcagcgtggttaaattcgcttgatatttttgctgaccagtcgtaatccgacgttgattcagctcaaaaaaattattctgtaaaactgccattaggtcgttgcccccaacagttagcgtcacaatatcagcttttgccaattgctgctgtagcggcttttgtttctgcacgcgtttagtaatctgtacactggtatcgcccgtcacaccgaaattggcggtcttgacgggatgcttggttgcttgctgaatctgattggcaactaatgacacatagccttctttgttggtctcatcaccaacaccatgcgtcaatgaatcgccaatcgcaaccaactgcaacgtcttttttggttttggttttgatttgatcactttatccgctgaagacgttgatgttaccgtcttaggcgcttggttgggccgtggcgttaatagttgccagataataaagaccactaaaatcgcaccagcaaataagcctaaatcaattaaaatctgtcgtgctttcttcaaacgtgacacctcggttatttctagataatagttaaggctgggacaattaaatgtcaaccagccttagtgtgttaatacattaattgtaatcttgttaatcctctgtgtagtacataacggcaaatgcgcctgcacccgcatgcgttgcaatcactggatcagttgtccggacaagaatttcgatgtttgggaatactacttgcaattgtgctttaattttttcgctcaattctagcccatccgcatgtgaaatcccgattgcccgaatctttaagtcgcgcatatcagcttccatttcatcgatgaatttcgtaatggtcttcatcccccggcctttgcgtaacacttttaattcgctatcagccacttcaaggatcaccttgatatttaataaacttgaaatcacaccagccgcatgactcaaccggccccccttaacgaggttggttagatcagtcacacccatgtataacttcgtatgatcgtgtacgttttgaatggctgctaaagcatcatccatgctaccgccgttttcaatgacttctgccgcttttaacacttggaatgccattgcacggtcggtaaagtcgctatcgacaactgttacatctgctttcgccatctcgccggcttggcgggctgtatcaacagtgccactaattgctcgtagcatgtgaattgataaaatctggctgccatcagccgctaattgttcatacgtttcgacaaaattcccgattgcgggttgactcgtcttaggtaaggtactcgcacttgccatttcagtcataaattgatcgcgggtaatggtttcaccatcgatatacaccgtattgtcaatcataatcgtcaacggaataaccgtaatatgatgttctttaatttcttcaggagtgagttggatggatgaatccgttacaattttaatattagccactattacttcagccacgctttctatcttgaaatctgggcaatcaacggccccgtgatttctatgattatgtctattgacagtatatcaaacaatcacgcttttttcaccaaaagttactgattaaaaaaaaagccagttgtcacttttgtagcaagcaaaaaggcggttacatcgctgcgaccgcccttaattgaatctttctaacggcgttgatagatttcaaacgtatgcgcatagcgattacgttcgtccaccacaccaggtgtttgactgatcaattcgaactgatccatcgctaattttggcatataaacgttgccttcaaacgattcagcaatttttgtaacgtacagataatcgacatcatcggcgtacattgcaaaaatatcggcaccaccaatgataaaaatctttttcatcgggttggcttgctcatatttaagcagttccgctttggtgtgcatcacaaacaccccatcagccacagctaaatccggttgtcgcgtaatcacaatgttttggcgtccaggtaagggttggacgggtaaactatcatacgttttccggcccattaccaccacttcatgaaccgtttcgtgtttaaaattggcaagatcgttgggtaatgaccatggtaagtgaccattttgaccgattaacccattttgatcttcagcccataagaatgctaacattggcgctcctcctcattaaaccgcaacggatgctttaattgcgggttctgcttcatagttttcaagtttaatatcggcgacatcaaaatcaaagatgcttgttttatctggattgagccacaattttggtgcggcatgaattgggcgttgaagctgtgtcttcacctgttcaatatgattactgtaaatatgggcatcacccaacgtatggatgaattcaccgacttcaaggccggtttcatgcgcaatcaaatgtgtcaataatgcgtagctcgcaatgttaaatggtacgccaaggaaaacatccccgctgcgttgatacaattggcacgataaccgtccgtcattaacgtagaactggaacatcgtatgacaaggcggcaacaccatacttggcacgtcttctggattccaagctgagacaattaagcgccgtgaatcgggattggttttaatttgttcaatcacgtttttaatctgatcgattgtgtccccagaacgggtttgccaagcacgccattgtttaccatagatatcgcccagttcaccatattgtttggcaaaggcttcatcgtctaaaatccgttcgttaaactgttgcatttggtcgcgataaacagtattgaaggccgcatcagtttgggcacgatgaccaaaatctgtcatatccgggcctgtgtaatcggcactttgaacgtaacgttcaaacgcccattcatcccaaatatgattattgtgttgtagtaagtaacgaatattggaatcaccttttaaaaaccacaataactcacttttaattaacccgaatggcacttttttggtggttaataaaggaaacccttcgtttaaatcaaagcgcatttgatagccaaacagactataggtgccagtgttggtacgatcttctttataatgacccgtttctaaaatggtacgttctaaatctaagtaggtttgctcagacatgatgtggattcctttctttaacgtgcttttcaaaccatgttcttgcgtttagctacacaagtcaaacgattgcttccagcaatcattcgccttgttaggctaatcctcagaacataaccggtttgaacgcacttcttttctttaacgtgcttttcaaactaggttcctgcgctttactacgttagccaaatcatcgactgcgtcgctaattcgcctaactaggtaaatgctcagaacctcctgaccagtttgaacgcactcagtttgcgtattcacttaagtattcccagcgggtcattttttcgtctagttgttggttaagttgatccatttgggcctgccactctgctaatttaccatagtccgcgccgtttgcgttcatttctgctttgatggtttcaatctgttcgtccaattgttccatgtcggcttcgatgtgttcgtattccttttgttcggcgtatgttaatttctgcttggtctttgcaactggtgcttcttcaaccgatgctgtcgctgctttaggcgctgacttagttggtgttgctttttgttttgccaagtaatcgctgaacaggccaacttcggtgctaatcttgccggccccttcaaaaatcaagagtttgtcggcaacttgatcgaggaagtaacggtcatgcgaaactgtgatcacagtcccgttaaagttttccaagtaattttccagaatcgtcaacgtgccaatatctaaatcgttagttggttcatccagtaataagacgtttggttgttgcatcaaaattttcaacaagtacaagcggcgtttttcaccaccagaaagtttgccaatcaatgtgccgtgcatttgacggctgaataggaattgttctaacaattgtgtgacactgatccggtccccatttttaccaatgacttcttcgccggcttcttgcaagtatgcaatcactcgtttgttaggatctaagtcttcattttgttgcgtatagtagccgaggttgacggtttcgccgacaattaactcgccactatcaagtgggaggcgttcagccaacacgtttaacagtgatgatttaccggccccgttgacgccactaatcccaatccgatcattcgcttgaactagaatactaaagtcatccaaaatctgacgatcgccgagttttaaactggcgttctttaattcgagtacttttttacctaaccgcgattgccccatctgaatatcgacttccgaatcgtctggtccagtggttaaattcgcctttaagtcattgaagcgattaatccgcgcttgttgcttggttgttcgtgccttagcacccgcgcgcatccacgttaattcttgcttgtagagttgttgttgcttatgggcagcttgttgttcacgttccaagcgatcagctttttgggttaaaaattgttcatagttaccgttatatgaatagagttgaccaccgtcgagttcaaaaatttggttcgcaacacgatccaagaagtagcgatcatgcgtgacaattaaaagcgcgccttgatattgtgctaagcgtttttcaagccattcaatggaatcaaaatccaagtggttcgttggttcgtccaaaatcaataagtctgggctttcaattaaggcttgtgccaacccaacccgtttttgttggcccccagataatgtattaatcggttgatccaaatccgttagatgtaattgcgtcaaaatcgtcttgatatccgtatcaaccgtccaagcatcttgttgcgtcatttgcgcatcagcttgttcgtattgcgtctgtaacttcggattagtgggatcttgcgtatatgccgccaagacgcgttcatagttttgaatcgtcttgaaaaccggattatcgccggcaaaaatcgccgccataatacttaagttcgtatcaaagcttggtttctgggctaaataactcatcgcgtattggttaggcgtttcaacctgcccgctatcgtatgaatccgtgccggtaatcgcgttgagtaacgtcgttttcccggtcccattaatgccgactaaaccaatgcggtccccttcacggattaaaaatgaaatgtcttcaaaaagcgttttttcgccgtaagtcttcgttaaatgcgttgctgtcaatgtttgcaatatagtcacctttttactttcgttaccatcaatcatagcgaataatcagacgactgacaatcaaaatgacaaaaagaatgtcgtaaactgtaaacaaataaaaaagcccctgacaacgatcaatattgtcaggagctaacgtttaaatttcagggtacatatctgcaattgtgtgttctgcatcaatcacaatgtacaaccgaccatttttttgtgagatttggctactttgataaatattatctaagccactattatctttattcttgaatgggaaataaatttgcattggtgcgcgatcttgatcatcttcaaagattaaatcgagtttttcgatgtcttgatacttcgttgcacgaccgaacatccccatttcaagagaaccggtgttgatgtcttcggacttcacatgatccgcttcaggtaagatttcggctttgaaactcttgcaagggtgaatctcttgcattgggccaccattaatgcggccataactggtggtaacacggctaatccaaatatcatttaattctttgtggctgacggtccaagcgtcaccatttctaaaataaaatttcaattccttaaaaacatgttgtgtcatcaattgtcaccctttctgaatgtgcttacatggttattttaacacaccttctgagggaatggcttagttttgtgcagccgattgcaataattgggcttgatcgtttggtaattgatctaacaccacggatttttcgagttgcgccaacatttttcctagttgcggaccaggttgatacccattttgcattaagacttgtccattgatggcgagttccgccttttgcttgatttgcagtgccgcatactttgcttgccactgatcaactgcgactgattcgttggtcattaattgggcaacaattaacgtgatgtctaatacatgttgccccgcttgataaagggcccactgatcggctgattggtctagaatggctggcaataatcccaaacctgctttaaccgcatcgatcacatcgttagcactcttccagcgtttcaataatttgccggcggcggcgggggttttacccaataatgcattgactagtagccaagccgtatcttcatcatgaatctgttgcgctggtaatgccgctaatttggtcagccccgctgcttcagtcgcgaacgctggacaatattgatacaacccggtttttaaaaaggtttgtaacccattttgccgctgaatcccttgtagcaacttcacaaattcgacatgaatgcgttccaccgcaattttcgttaatagttcagcatgtttggcaatcgcagtttgtgtttctggtgtaactgcaaagccgagttgactttcaaaacggacggcacgcatcatacggagtgcatcttcgtggaaacgttcgtcggctttgcccaccgctctgatttgttgcgcttttagatcggtcaggccatcgaataaatcaataatttcaccatcagcgcgcatcgcaagcgcattaatcgtgaaatcccgccgttgtaaatcttcgtctaacgaccgcacaaacgtcactgaatcaggccgtctaaaatcttgatagccactttccgttctaaaagtggtcacttcatagccagtcccatgatcaagaatcatcacagtcccgtgctggattccggtatcgaccgttcgtttaaaaatttgcttcacttctgctggatacgccgacgttgcgatatcaacgtcgtgaatcggcaagcctaataaataatcgcggacactgccgccgacgaaataggcttcaaaacccgccgcttcaatttgttttaagattggtagggccgcttcaaattccggcgcaaaggtggttactttcatggctatccctcttatctaacaattaactgtttctgatgctatttatcataccacaatcaaggaccccacttcagccaccaaagtggttccaactgtttttaacccccattccgtgctatatttgagttatgtaaagggggcgttgacatgacgaaacaacatacttggcaaacgactagtcgtgatttagcggtgattgcgctgggctgtgcgatctacgcgtttgggctagtgaccatcaacattcaaaatcacctggctgaaggtggcttaaccgggattaccttgattttacggtattggttgcatatcgacccggcgtattcaacggctttgttaaatatcccgctaattattctaggctatcgttacctcggtaaacgcgcactcgcctacacgatttacggaacggcgatgatgtccgtttttctatggatttggcaacgtgtccccatcacaattgatttaaaccacgatattttaatcgccgctattctagccggtttatgtagtggcttcggcagtgggattatctaccgcttcggtggcacaactggtggcaccgacgtcattgcccgcattatcgaaaaagaaaaagggatgccaatgggccgctccctccttctttttgacgtcgtagtcttaacactctcactcagttacctcgatatcgaacatatgatgtataccttaattgcgtcttacgtcttctcccggattgtgaacttcacactcgagggtgcttacgccgccaaagggctactcgtaatcagtgaccacgcgcaagcaattgccgatgacattctggccgatatggaacgcggcgtgacgtttctacaggccacaggcgcttatgcccatcaagaccgaccaatgctgtactgtgtcgtcagtccaagtgaaatcgcctatcttaaacggttgattaaccaacatgacccgcacgcattcgtttccattattgatgtgcacgaagcactcggggaaggctttacgtacgactaatcaataaaaacgccagcgattaatcgctggcgtttttaagtgtctttatgataattcctgtccctcagttaactcaatttctttttcaacttcttcaaccgtcacaaaatatttttgattgcgcagaacaaagaaaatcccaattaaaatcattaagctcgcaaaataaaaagtccaatgcgctgaccatttctcagcgattttaccagcaacaaatggtgcgattgccccgccagtaaagcgaataaagctatacgccgatgatgcaacactgcgttcaatcgaatcattttccatcgcaaccgtcgttaacaacgtattcaccaagccttggaagaaaccagcaatgatgacgccaaaggccactaaggctggttgatctgcataaataccgatcaccattaagcagatcaagaaaaagcttaacccaaacaacaacgtcacaagggtattcgttttttgttccatccgtggtgcaatgaaaaccgatgcaatggctaacatcacgccccacccgaaaaagacaaaaccaacttgcaattcagttaacccaactaataagaatggtgcatacgctaaaatcgtgaaaaacccgaaattatacaataatgcaataatcccgattgaacgtaaacgatgattttttaacgcgacagcccctgcaaaaaaaagcgcccttttagcaggtttagcaatcggttctaatgaaaccatgatggtcaacgccgcaataaacatcaaaatggcgacaccataaaacggaaaacgccatgaaagactccctaagacgccacccacaagtggtccaacggccatcccaattcctaaagatccttcgtataacataatcgcttgttccgttttttcaggcatcacactgacaatcgcagtcaaagcggttgataggaacaaggcgttcccaaagccccaaccggcccgtagcgaaattaattgcgtaatggtctgtgaacgaccagctaacgccgcaaataaaacaataatgatcaaaccaatactaatcgtttttttcgcaccaattctagtggaaataaaccctgtaaatagcataataatccctgtgaccaacatataactcgtaaatagtaaggtcgtttgcgctggtgtggcatttaatttaaccgcaatcgtttttaaaatgggatcaactaaaccaatccccataaatgcaaccatacacgtaaatgcaacggcatacgccgagcgtagccctttattttgattctccagcaacatatcactctctttctctttatataaactacattagattgcaaaacatatcaatttttacattaaaatttgacataatatagtgacatgtttgttgactctaaatatggtatactgagcaataattaatcgattaaagggtgaaataatatgagtacgcttagctatattttattatgtatgttagttcgcaaaccgtgtagcggctacgaattaaagcagtacattaatttattttgggaagcacaccacagtcaaatctacacggcattaaataaactgcacgaacaaggctatgtcacggttaaaattgatcccgttcataaacaaaagaagatttatcatttaacagaagccggccaactcgtcgttactgactggtttcaagaagaaacgaatttacccacacaacgtgacgagtttttagcaaaagtttacgttatttcactgttcaatcaagaacaagcagctgacttactccaagatcgccgccatcattaccaaaaaattcaaaaacaataccaacataagatgcaagaatacaacctcataaccgatcccaccgaaaagcaaaaaaacttaggtcgttacctgattttgaaacggcgcttaatggtctgcgcaacagaattagaatggtgcgcgtgggcgcaggacattcttaaccgcaatcaaaaccaataaaaaagacagctaatgcacttaaaaatgcactagctgtcttttttatgctttagttaaacatttcccacaataaacacgagctaaattaactatcgttagcaggcaaagcatactaacggccattaaaaacggtccagcgagcaaagccgccattgagatgggtgcttggtacaaaatggttcgcccgacatgaatcgtcaggctccaaactaagcccccggctagtaggctgactgcaagacaaacaccaactaagatcactgcatgcgattgttgtgtcagcaatagttgctgttttgttaaaccgagcaactgtaattggcgcatttgctgggcattatcctcttttgcgactaacagcgtcgccaatacattcgctaatacaatcagtaacggcgcgcccaaatataaaccaattgtcaaaatgaaattcaccaaacgttcattgttggcactcgtggtatttgtataggccggtatattccacataattgccgacatccccgtaattaaaaccgcaatgaccgtcactggcgtatacaacggcaaatatttttcagcagtatagtcaatatcatgggctgccatgttcaaaaagagcgttctagcacctaaccaatagagcacgtggctaattaattttaataccgtgtgtccggtaagcgcaattagaattaataataagaacaacacgagattcaggttgccaaccgaattgccgagactgccaattgctttctcggaatgaccgacataggttaacgccatgctttgcatcgttagtttaataattaacccactgacgaccattaacgaaacaatcgtcctaactctacgaacgatccgccgtcggtgactgagatgcttattcccatcttttagttgatggcgtgcatgccaaaaaccaccactaccggcaattagactaaccaagacaaccgttaacaaaagtgccaagaacgaaaaatgaattggcatattcggcaacatttggggcccaacaatctgctgcaaccacgcataacaaaaacgcgttagtggcaaggcaacgactccgccgagcagagcactcaccccactgacaattccgatttaaatccccaaaatagcggccagtgcattgatcgttgcccctagaatcgcaagcattcgatagtccgttttaaactgatccaaaagctggtgcacgacttctttaatcacgattaccattgtaataccaccaaaaaataccggcatgataaaaatcggcaacggtgtattcggaccgtatagatcaacttgctgcgactgtgccacattcacaattcccgttaaacaaaaaccgaggattaaacccactgttacaaaaactggtattgttgctagccattgccgccaggaatgctttaactgtaaccaactgattgtccacatcgcttacaccacctgatccaaggcagcatagattgtcgcaagtgtcggttcagtcacaatttgctgaacctgaccgtcttttaatacaatcgcacgatctgtctgactagccagctcaatatcgtgggtcaccataatcaccgttctccctttagcaaccatctctttgaaatatgtaaaaataatcgctttggatgccgaatctagcgcacccgttggctcatcggcaaatagcacatcacaatcagttagaatcgtgcgagcaatcgcgactttttgttgctcaccacccgataaagtcgcaacaggcccatcgatttgtcccgcaaagttcattttggtcagtaactgtttaatctcagcacgttgcggttgctgatgactcaagcgctgttgtaagacaacattttcaaagacgggtaaagactgaatcaagttgtattgttgaaaaataaagccaatcgtctgtctgcgaaaagccgctagttgattgggtttcaattgatacggattaatccccgcaattgccacagtgccgcctgtaggtcgcgtaatccctgaaatacaatacaacaacgtactcttaccagacccagaaggcccaacaatactgaccaactcccctttttgcaccgtaaacgaaatatttttcaataaggttgtcgtctggtcagactgcccaattgacaccacttgtgttagttgggcaaccgaaagtattgtgtttgtcatcctaaaaacctccccaaataaatcctgttcccgattcctcttcaatgtaccactttcatctggggaagaaacgcgactaaagacgcaaaaaaacgctcgactaaagtaatagtcgggcgtttttttgcattattgcatggcttggtaatcgtcatagagagtttgcatctctaaatcgtttggcacgagcttcaaatattgtttgagggccgctaacatttctgggacctgtgccatttcttggaagaataaaattaaatcgtgtagaaagtccgagttatctttcaagtcaggataagctaacagataattttcgcgcgcttggtcaacatcatccaccgccatctgtgattgcgccaatgaccaatataaatcagccgttggtttatgattttcaatcgcatcttgtaagaaagcaatgttttcggcatggcggccttgacggcgataaacttggctcaaggcactaatttcgcccatattatcaggatcaatcttgagggcctcgtttagcatctgttcagcaacctcgttattgcctaattgaagcgctagatcgctccccttttgatagaggacctcgttgtaggcatcgtacccaattccggtctgaacggtcgttaaggcgtcttctaattgattctgagcctcttgagctgctgccaagtaagtatatagtgacgtatattgtggatcagtcgtctgtaacttggttaagatttcaattgctttttgataatccttaatttgtaagtacaaaaagcccatctggaattgatcgtcttctgttagaaattctggcgtcaacccttcgtaaatctgcaaagcttcttcaaaagccccactgctggcataactagttgccaaccgcttttgaatattcacctgtcccagttcaacaacgtcttggtcgattagcgtctcatagtaattggcggccttcacatattcacccatttcaaagtacaattcagctaatgcgaattgcatgacgggttcatctggatataagcgcaacgccgtcaataatttttgttcactaacttctggtaagcccattgtttgatagacatcagctgccgtcagcagactttcggcgtacgcattggattctggcgtaatatctgccaacaagttcaaggcgtcgtcgtattggccatcgctgaccgcaatatctgctagtgttgttctgatttgatcttcttcaggaaattgggccaacaattgttggtaaattgtcgttgcttgttccaaaaaacccatcgcatataactcttcagctaagctgtagagcgtatcgggttcatcagcaactaaggcttgttggaagtaagtctgtgcttgttctaaattattatcttctaatgctgtaagcatttgttctgaattcgtcatttaaccaccctttttcgattgttccattttaacatattcggattaattgccaataaaaaaagactgggaaaaatcccagcctataaattgaattcttatttaacagaatcctttaatgctttacctggcttgaatgcaggtactttgcttgcaggaatcttaatttctgcaccagtttgtgggttacggcccttacgagctgcacgttcacgtacttcaaaagtaccaaagccgattagttgaactttgtcaccttttttcaaagtgtcttggattgaaccaaatactgcatcaactgcagcagttgcatccttcttagttaaaccagtctttgatgctacgccttcgatcaattgtgctttgtttgccatgtttttcacctcctgctcatcacagataatcagtaattaattaccgaaaccatttttgagtggtcaaaaatgacgaaacaatgatttgatcaccatttcattttttaatttatcacacaaacctagtgatagcaaggaatttcgctaaaaaacagcattctgagcaaattagttaatcatattagcggatttttgaaaaaacagcttattttcgttgacgagggatcaaatggattggtgtaccagtaaagtcaaaggttttccgtaattgattcttcaagaaacgttgatatgagaaatgaagcaagttaacatcgtttacgaagaccacaaatgtaggcggttgaaccgctacttgtgtcatgtaataaatgcgcaatcgtttcccattaatagctggagttggtgtcaccgttgttgcgtccatcaagacttcgtttaagagtgctgattggatgcgccggttttggttttcactcacttgttcaatcatcgctggcaagttttgcaagcgaacgccggtcttagccgatacaaagatgattggcgcatagtctaagtattggaattgatcgcgcacgtgattttcgaactctttcatcgtgtggttgtcttttttaagtgtatcccacttattaaccacgatgataatcccacgaccagcttcatgtgcgtagccagccactttcttatcttgttcacgaataccttcttcagcattcaaaacgactaatacgacgtctgaacggtcaatcgcacgtaatgcacgcattacggcgtatttttcagtattttcgtagaccttaccccgtttacggatcccggcagtatcaatcatggtaaattcttgattatcttcagccgtgaacttcgtatcgatggcatcccgcgtagtcccttcaatttgagagacaattacccggtcttcttttaacatcgcgttcacaagtgatgacttcccaacattgggacggccaatcaaactaaacttgatgctatcgtcttcttcttcgtcatcttcagctgggaacttagcaacggcggcatctaaaagatcacctaacccttgaccatgagcccctgaaacggcgatgggttcgccaaagccaagactatagaaatcaaaaatatcttggcgttgttctggattatccgccttattaaccccaagtaagatcggtttgtcagcgcggtataaaatttgtgcaactcgctcatccgcatcagtaaccccttctcgtgcactcactaagaagataatcacgtctgcttcatcaattgcaatttctgcttgttgtttaatctgttccataaatggtgcgtcactaatttcaatcccaccggtatcgattaggctaaattcatgccctaaccattcacttgtggtataaatgcgatcacgcgtaacccctggcgtatcttcaacaatcgagatccgctcaccggcaatgcgattaaaaatcgtcgatttaccgacattaggtcgaccaacaatggcgataactggttttgtcattgtattcattcccttcgttgttcagtgtaccctgtctgagccaaactgacaaggtcactccgacaaagtccgctgaacttccgcttcctctgcgtcgtactaatcaatcaccgacataaacgtagggtctgggacaaaacctagttttgtcccagaccctacctttttgcatatgacttttaaaaaaattatttatcgtctaatgttttaccaagcatgtcgccgatactgaaacctgtttcttcttctggcatcacatagtcagaaggcgccacatcttcgtgttctgaatccttagcaccagcaggtttttcttgcaatgctttgattgataaacctaaacgttgttgttcaggatcaactgataagaccttgacttgaaccgtttggccttcttctaacacatcgtttggtgtggcgatatgttgatgtgagatttgtgaaatatgcactaaaccttcaaccccagggaagacttcaacaaaggcgccaaatgttgttaaacgtttaacgaccccttctaaagtgctaccaactggtgctttatcagcgatatcatcccaaggaccaggttgcgtatctttaattgataatgagatccggcctttttcttggtctaagctcaagactttcacttgcactttttgaccaacttctaagacatcagaaggttggttaatgtgatcatatgaaatttcagaaacgtggactaagccgtcaacgccacctaaatcgatgaatgcgccaaagtttgtcaaacgagcaacttcaccttcaacaacatccccaggtaacattttttcaaaaactgcttgtaacttagcttgacgttcttgttccaataatgctttacgtgaaagaattaaacggttttcacttggttcaatttcaataatttgtaaggttaattcttggcctttaaagctgcttaaatcacgtacgaaacgatcagaaatcattgaagctggtacgaagccacggacaccagcatcgacgactaagccgcctttaaccacgtcgataactttagctgtgattgtttcttgattagcaaatttttgttcaatttcagaccaaactttacgggcttctaagcgacgtttagataataagtagctcccgttttctttatcgttaccgattcttgaaatgaccactaaatctaattggtcgcctactttggcaacgtctgcgatgtcttcaataggttgacttgataattctttttgaggcacaaccccttcaacaccagttccttcgatgccgacaatcacttgtcgatcttcaattgctaaaacttcacctttaacaacgtccccaattttgacttcgtggacactgtctaaagcagctgccattgcatcgctgctttgggtgttattcaaattagcttcactcatagctaaaatcctccttaacgactatctatacagttactattttagttgatatctattcggattaccagttattttacctcgttcaaagataaaattacatatttttctttacaattgctaatattgtgtcgaccacctcatcgattgttaactgagttgtatcaatttcaatggcgtcgtcagctttttttaagggtgaaatggcccgtgtactatctttttgatcacgtaattcaatctctgcttgtagcgttgctaaaggcgtcataatccccttagctgtattttcagcataacggcgtttagctcgttcttgggcacttgccaccataaaaattttaaccttcgcagcaggtaacaccgttgttccaatatcgcgtccatccatgacgacttgaccttgatctgcaatctgacgttgccgtgcaaccatctcagtgcgcacaccagctaaagctgatacttgtgagacattattcgtaatttcaggggttcgaatggctaatgtaatatcttcaccattcaagaagactttttgccctgcttggtcaggtttaaattggatatctgcttcttttaaagctgctaaaattcccgcttcatccccgaagtctaaccctaacttctgtgctaacacggttgatgcgcgatacatagcacccgtatcaacgtatacgaaccctaatttagtagccacaattttggcgaccgtacttttaccagatgatgctggtccatcaattgcaatttgcatgttctgcctcctgaaaaaatcattaaaaaaggctgggagtttccccaggccttttggtagtactgattatttaacttttagagctgtgcctggtgccacttgtgaattggctgttaacccagggtttaatgcaagtagttgatcgagtgttaaaccgttattaaccgctgcgcggtataaaccttcgccggctttcaacgtataagaaccacccgttgtttcgcttgaactgctactttcagttgttgtttcttcgctactactattttgagcgtctgcttgagcttggctttgactattagccttttcagcttcttctgcagcttgtttgctactttcaactgcttggctttcactagccgctttttcactttcagcctgtttagctttactttcgctggccgctttggtagcactttcgctagcagacttcgcttttttagcttctttcttagaagcactatcactatcagaagtattaacgacaatcttactagactcgactgggcggttagcccggctagaatgaatcgtataggcaataatcggaaatgcaatcattaaaacaagcaatacacctagaataatggcaaaatatgtatttcctttttccttactcttggaagcaacacgcgataaattcccgcgatcatcacgatcatcatcaaactggctttcccagggtttgtcttccgtctgattatctaattttttcttatcatctttgagcattgacggccctccctattggtattctttgatattgtaccatagacccttttaaaatacccagaaaatctctaaaacaattgcttcaaaataccgtcccaatggtctaacccgtctattttaggggatttatcatcagttaacgtttttaaattaaatttttctaaaaagaccgttgaatcctgttgaccacaacattgatcagcatgggcaacctgttggggttgctcgtcaaaatagttcacaataaattgccgccgacagccttgtaagtttaaataatcaaccattgtttgaagcgcaaaacgcttttctttttgccgattctgtaacagttcactaacggcctgttcatccatcccaatttgctgataccgccgtaataattcaaactcgttgccttggctttgtttaaataatgtcggttcttgatagaaacgccgaatcaatccagcttcaggaatcccaaatgacactaacgactgttgcagatacgtatcttgcggtgttgctaacaacattgcataggctggttggccatcgcgccctgcacgaccgacttcttgtagataactttcgatattttgcggtaaatgatagtgaatcacatagcgaatattggctttattaatccccattccaaatgcattcgttgcgcagattacgtccaactgcccttgcataaactgttgttgaataatgaagcgctcctgtggcgaaagcgctgcgtgataataggcaactcgcatcgctgtcttttgttgcaaaaaagccgcaatctcgacggtcttttgacgacttgaaaaataaataatcccgggcccctgactctcagttaccaattgttgcaaaaaggcgtgcttactcgcttcatccgcttgttgactcacccctaagtaaatattaggacgatcaaccgacgtaataatcctattggccgactgcaaatctagcttggctaaaatatcatgccgaacctgtgcatcagctgttgcagttagtgcgagcgttgcccccggatttaattggtgcttgatttgcgcaagcactaaataatccggccgaaaatcaatcccccattgtgaaatacagtgggcttcatcgatgaccaataaatcaatctggcattgttgtagtgcttgaatgaccgccggctggcttatcgtttcaggcgccataaacacgaaacgatactgtggcaattgtcgcaataacgcatgcttttgccgcggttccaaatttgaattaatcgcgactgcctttttttcaccttggtaattcaactgtgcgacctgatcttgcatcaatgcaattaaaggtgaaataatgacagtggtatggcccaaaagataggctggtaattgataacataatgattttcccgtcccggtcggcaaaaccgccaaagtcgcttggcccgccaaaacagattgaatcacttctaattgtcctggcttaaatgtctcatagccaaaccgctcttttagcgttttataaatcagttcatccgtgctcattgggcgttcacctgcctttgaatttgataaagccgatactcaaagaaatctagaccggggagtgcggtttgtgcttcattatagctgagcgatggctgttcagtcatcaatctagctagtttttgtgtagttgcatcctttaagaattgttcaaacggaaaccgtgggagtaacatcgcggtttctaaaaggtgttctttaatcgttccgatcttaacccggcgctggcggctgatttgtttaacactcgccccttgttggatcaattgccaggtctgtaacgtactctgactcaattgcgtttcagcctgatccactaattcattcaatagcggataagtcgtttggtgcgccaataaaagccctaaaatttgagcaaaggcgtcgatggtccgcacacgaactgtcaaggatgggctatctaaggcttgcgccagttgttggtggcttttgcccaagacttgatgtccgatcagttgatttgccacaagatcggcttgttgcggatctaactggtcaagtaattgcgccaattctagctggaattgactgctaaaattgatggttgccttatgccgcttaaaccaactgaccaccaacacgcggtccttcatactcgtttccaatggatagtactgcgtattttgatgatgatattccgacacaatttgaacggccaacataaaacgagcagtgaattggggtaagtgacccatctgtgggccttcatagtgcgtcggccaaactaattgcggctgccattcagcttgtttttgttgcccggtagcagtcaaccaaacataccgctcatcgatttcaatccaaccattttgctgaagtcgttttaattctgcttgaaattgtgcctgttctagattaggataaatttggagccattttaataatccatatgctaaaccggcatacagatttgaagtagttcgtttaccaattaaggtatagtagattgcttgataccgccttttctcaggcgccaacaagcatagtagatacgccattaacatcatcaattaagtcctttattgagaaagtgtgaatttaatgctctatagtcaagtcatcccggaacgctgtatcgcctgcggtctctgccagctaaaggcgcccgacttattcgattacgatcaagaagggatcgccttttttaaacccgatcataatcagggaacgacgccaattgaagatcctaaagaacgaattgcgtttaaaaccgcctacaccgcctgtccaactggtgcgattgtacgccaatcaacgccatttttatcgtagcatatttacgtcctataaaaaaggttgtgcccgcttggacacaaccttttttgctgccatttatttggcaattggtttttgcatatgttgttttagccatggtaaaatccgtaaatataaaacggcaaacaccaccgttacgagtgcacctttaattaaattaaacggtactaatccaaatagaatgtatttggtagtcgacattcctaagttcaaacccatcaatttaatatagagcggtaaaatgaaaagccagttagcaaatgacatgaagatcgtcatgctgacagcccccgcaacaccagcaattgcttgacctactaaaacgttcgattgacgcttgaataaataatagaatggtaacaagtagcagattgacgccaagacaccggcaaagtcgccgaccaaactcggtaagctagcaccggtcataatgaaatgaagcgtcgagcgaatcaatgcgacccccattcctccaattggtccgtaaacgaacgtccctaacaggacaatcacgtcactaaaatcaatttttaaaaacggaaatgcgagaataattggaaattcgaaaaacatgacgacaaatgaaattgcccctagcattgcgaccccaatcatcgtacgaacttttgaaacttgcattactaacaccctccagatgaggttgccttcgtcagcggacttagccaagtctgattgcatcaaaaaggtctgttaatcagggagattaacagaccttacttgcatacattcatacccaaataagccctatcttcttccatctagactttcactatcggtactggaatcacaccagttcagccaccacaagaatcaacattgtagcaggtcgcggacttttaccgccggtcgggaattacaccctgcccctgaagacgaaccattaatattttgttcgaaataagcatagcaaatcaacgtgccaaaagcaactaattaatcatgccgtgataattttggtcgattcttatgctgtggtttttcatttagttcagcaatttttttgaattctgcgacttcgattggtttcaaagcacggtattcgccagaaactaacccatctaacgttaagaaaccatatgtttcccgtttcaactttgttacgggtaggccaaccgcagctagcatgttcttaacctgatgattcatcccttcgtgaatggtgatgcttacaatggcagtgttcttacgccgatcagttgaaattactttgaccttggctggtgctgttttgcgtttttctaagacaattcctttacgcaattggcgcaacatatctgcagttggtaatcctgaaaccttcgcaatataagtcttgtcgactttatattttggatgcatcatcatgttggcaaaatcaccatcattcgttagtagtaataagccagatgtatcgtaatctaatcggccgattggataaacccgttcaacgatatcgccaaggtattcagtgacgacccggcgtttcttatcatctgtcactgctgaaatcacttggcgtggtttatacaagacataatagaccttgcgttcacgcgttaacggcacaccgtcaacttcaatatgatcgcttgtgctatccaccttgatacccatttccttcaccacttcaccatttaaggtgacgtgaccagttgcaattaaggtttctgctttccgtcttgaagctaccccagcatttgcaatcactttttgtaatcgttccatttattgttctcctttggacgtctcttccgacgtcgtatctgtttcatttaacgtttgttcaaattgacggtaatacaagtctgctgtaccaccttcactaccatcgacatcagcgtcaagtgccaattgttcaagtggtggtaattcatcgagcgattcaagaccaaagtaatctaagaaataggtgctcgttccatataaaattggccgaccgggcgcatccttacgccctttttcgctaattaattggcgggctaacaaggtttggatggccccactactttggacacctcggacctcatcgacttcaatccgcgtgattggttggcgatagacaataattgccaatacctcaagagcggcctgactaatactagttgacaccggtccatcaaaataggtcttcaacaacgtcgcgtattcttttttggtgactaatttatagatatcttcggcttgaatcaggttcaaacccgattcagtgttgccgcggtaacgatttgccaatttttctaataactggcggactgccggttcatcgagatgaataagctgcgcaatttgcgcaagcgcaattccttcgtcccccgcgacatataataaactctcaatttcagcgagatgattcaactgaaatgccctccttcaaccgaaccatgattggtgcatcatagtcggcttgttcgcaaataatttttcgatccttcatcaattctagtacggctaaaaatgttgtgacgatttcatctcgatctgttttaacaacgaccaacgcttcaaaagcaactggttgagcggctaaatgacgcacaatccaactcattttatccgtaatcgaaatttcgtcattttggaccgttttgaagaccggttgtttagcttgggcttcgaccaacattttagaaactgcggccgctaaatcgcgtggcttaatcacgccgcgcgccagtgggaccactttttcagctggattactactagctggcttagcaaagagctgttggcgctccaattcgcgctcttgcaaaaccgttgcgaccttttggaaggcttggtacgccaatagttggtccactaattcctgccgtggatcgacgtattcttctgtttcttcttcaattaattcaggtgccttaggtaagagcaacttactcttaatcttcatcaacgtcgccgccattactaaataatcacctgcaacatctagtttcaatacttgcatttggtgcaagtaatcaagatattgcgcggtgatttcagcaatgggaatatcataaatatcaatcttagtttgcttaattaaatgtaataataaatcgagtggtccttcaaaatcagtcaagaccaacgttaattgttcagtcattggtcaatctagtccatttctgtattctgatgttgttcccatttagcaatcaatggcgcagtctctaacgaacccatcacgcgactttcaggataaagcgccgctaattcatccaacatggtgaaatagttctcgtcgctacgttccgaagggttcagtgaaatatggcgcactaaaatatagtccgcacccagttcaatccccacaacaccggcaaaatcgccggcttcattgcgccataaatataaattgcgttgctcatccgacgtatagagcgccaattcagcttgtacatgactgacttcttttaaatccggtacgaaggataaaaagcccatcgcaatcttttcataatcatttttatacttgaataacatgttgacctccattgatcaaacaaagttctaatagcattaactctaccatagtttataaagcgcgacaaatctaatttaatcgcgtggatgactccattggtaaacttctgtcaaatgtttcttactaatatgcgtgtaaatttgagtcgttgaaatatctgaatgccccaataattcttgtacaattcgcagatctgcgccattttcaagtagcacagtggcaaacgaatgccgcaatgtatgtggggtcacgtctttttcaatcccagccgttttaacatgtgccttcaggttcttccaaatcccttggcgcgtcaacccgttaccatggaaattaacaaacaggtacgggttagcacgccccttcgttaattgattccggctacgatcgaggtattgattaatccaatcaaccgctacatcaccaatcggtataatccgttccttattccctttgccgagggtctgaattaagcccagtgataaatgcaaatcagccatctttagatgaatcagctcgctaactcgtaaccccgtcgcatataaaacctctagaatcgctcgatctcgtaatccaagtgcggtgctcgtatctggtgccgccaatagtcgctcaatctccgccgtcgataaaacagccggtagatgacggccttgtttgggcgaatcgatttggagcatcggattttgtttaatctgcttttcacgcgctaaatactgatagaatttacgtaacgttgaaatgctccgtgtaatactactttgtgccttatgcacatcagtttgttcttgcaagtagttcaaaattaaaaagcggtcttcagtaaaattggcaacctgctgacgttgtaaaaacgccgcaaactgttgtaaatcctgccgataactctggcgcgtattctccgaaagaccgcgttcaacttttaaataatgtaaataatcttgaattaaatcatccatgtacttcctcttttacaactgcgtcacgtcaatttggcgactaggatccagttgattggctggtaacccattttgttggttaatctgttggcaacgtgcacaaatcccgtgaaatgttaaacgatgatctaacaccgtaaatgtgtaatcatcatatacctgttgttccacggcaggcaataaatccgtatgaatttcttcgattgccccacattgcagacacaacaggtgatggtggaaatgatggtcgtgatcagtctcacacaagtcatagtgggtcatcccatcttcaatgaaccgaactttattcaacacatgcagttccgtcaacatctcaagggtgcgatacacagtggccaacccaatttcagggaccacctctttagttgccataaaaatctgttcggcactcagatgcgcttgggcatggtccaaaatgaccgccaccgtcgcagagcgttgtgctgttaacttgtagccggccgcttgtagctgctcggatattcggtctaattgctcagctttatccatttagcaacttccttttcaatcattcaaaaaagcttagtcttgcttctcgtcatctgtaattggggcaatatcagcttgacctttttcagttaaactcgttaggccctctgcttgagtaattaagccatttttcattaaccggcctaatgcccgcttaaaactgcctttactaatcccaaagtaactcttaatcgcttctggatcgctccggtcagtgtatggcattgcgtaatcaggttgccgttttaagacagccataatcatttcagcatcgtcgccaatttcttcatatgcccgtggtttcaaactgacatttaaactaccttcaggtcgcacaccaatgacgcgccccttaacctgttgacccaaacgtggttctgcttcacgttcagaaggatgaatgaacccaatgtaaaagtcatccgttaaaataaacgtcccggctaacttcaaacggtagaccgtccccatcacgtcttggttcttcatttctggtttagcaccttttgaaattgatctgaagatgctttcgtcagctagttggccccacatccgccctttttgatcgacttcaatcgcaatcattaaacgatcacctggtttaggccataatttcgtaatggttggtaaaatatccagtgatacgacaatatccttatctggcaagccaatattgacgaaaacgcctaaatcacgccgcgtttcaaccacttcaccaaaggcataatggcccacgcgtgatttaggaataaacgttgataagatcaattcccgacttgagttttcataagcaaaaccagtcaccgtttcaccgattgtcaattcttgttctaaagtttctttttttaattcaaatgtcacgccgtctttttggacaaagaaggctgtttcattttcatctgttactaaggcagtaatgacttgcccgattaattcattcatagttaacctcttttattcttattaattaatgaattggtactaaattaaagaccgttaaaatggtataagtaatccccgctgcaattacggggccagccgcaatcccttttagaaaaacgacacccatgatggtcccaaaaaccaaggccactgtcatctcaggactagcggacaatagccccacacccttcgctgatagtacagcaactaacacgccacaaccaactgcaataaaacccgccggcgttttaaaggcattgattaagtctttgacaccaatttgccctgttgcaatcgggactaggatagcaaccgaaatcactgtcactccccaattaatgcctttggcttggatcacaggcagcaccttatttgaaatcgggaatacctttaatattaaaacaaccgcggtcgcaatgattaaagattgatttttcgctaacaatgcaacgattaaaatcgctactaaaaataaccaactttccatgtaaacctccaataaagtctccctactattgtaccgataaatgaacgacttgtcagtactttcagaaaagtaattcaagattcgcatttttaaaacaaaaaaagccccctcttttcagagggggcttcatttcatcattcaggaatgattaaagagcgtttgttgcaccgcggtaaacaatcccacgacgtgaatcaacagtcacaacttcgccatctttgatagcttctgttgcgtctttagcaccaacaacaactggaatacccatagcgataccaacaacagcagcgtgtgatgttaaaccaccgttttcaacaacgatagcacttgatttttcgattgctggtaagtaatctttgtcagttgatttaacaactaagataccaccatcaattgctttttcagcagcttctttagcgtttgaagcgacaacagccttgccaacgattgtttcatcgccaacaccttggccttgtgttaattttgaaccaattaattggatcttcataacgtttgttgtgccacgttcgccaacaggaacaccagcagtgatcaagattaggtcgccttctttagcaaaaccatgttcttgagctgtttgtgtagctaagttgaacatatcatctgtattagcaggtttcttagcgataactgggtatacaccatagttaactgttaaaccacgacgtgtacgttcgtcgaatgtaacggctaagatgtcagcttgtggacggtatttagaaatcatacgtgctgttgagcctgattctgtagcagcaacgattgtcttgattcctaagttacgtgcagtgtgagcaacagcttggccaattgattctgtcaagttagtcttgctgtatgctttcaatgcgtatgcatcgcggtctgttaatgatttttctgttctttcatcaatgcgagccattgttgcaacagcttctactgggtagtcaccgttagcactttcacctgaaagcattgttgcgtcagtaccatcaataacagcgttagcaacgtcgttaacttcagcacgtgtaggacgtgggttttcttgcattgagtccaacatttgtgtagctgtgataactggtttgccaatagcgttacatttcttgatcaagttcttttgtacaaaaggaacattttcaaatggaatttcaacacccatgtcaccacgagcaatcattaaaccatctgaaactttcatgatatcgtcaatgttgtcgataccttcttgtgattcaatcttagggaagatttgaacatgttccatgtgtttttcttctaataattcacggatatctaaaacatcttgaggtttacgaacaaaacttgcagcgataaagttgatttcatgatctaaaccaaaacgaatgtcgctagcatctttttctgtgataccaggtaagttgattgaaacaccaggtgcgttaacacctttacgtgagccgaccataccgtcgttttgaacttcagtaacaagttctttgtttgcttcgtctttttcaataattttaagatccactaaaccatcatcgattaaaacgtgtccgccgacatgtgtgtcgtcgtatagacctgggtaagtaacagcgattttttcaggtgttccttcaagtgtatcgtccattgaaatacgtaccacttcaccagtgtgtaattcaaatttcttaccttgttgaacagttgtccggatttcagcaccctttgtatctaacatgataccaactgttttaccagttaatttttcagcttcgtgaaccatgttcatccggcttaaatgttcttcatgatcaccatgagagaagttaaagcggaatacattagcacctgcttcgattaattttgtgatagtttcaacattgttacttgcgggtccaagtgtacttacgattttggttttcttcataagtggaatctctccttttatgtctattttttaaaagacttttcagtcgttttaacaattttatatatggaacgatgaatctagtaagctaaatcttcgtttaaatcataaagatctaacattgcgtgatgcttgtgattgaacaagtctaacatatcatgtgcgataatttcgttcttttcaatcccaagtgcaacgccacctttgccttcaagcaataattcaactgcttttgagcccaaacgacttgctaacacacggtcactagctgttggtgccccaccacgaacaacgtgtcctaaaacagttgaacgtaagtggaaatcgccgtattcagaaagtttttctgagaattcatcagcgtgcatcacaccttcagccaatacaatgacagcgtgtttttgaccatgttcacgtgaagtacgtagcttatcagcaacggccttaacgtcgaaatcatgttcagggataataatgtcttgtgcgccaccggcaacaccagcccaaagcgcgatatcaccagcgccacgacccattacttccacaacgaaagttctttcgtgactagcagctgtatcacggatccggtcaattgattcgagcactgtgttcacagctgtatcgaaaccaattgtttgatctgtaaatggaatatcattatcaattgttcctggaagaccaattgcgttataaccatgttcagttaaacgaagtgcaccgtgataagaaccatcaccaccgatgacaactaaagcttcgataccaaacttcttgagttgttcaatacctttcaattgtccttcgacttgtgcaaattctggataacgtgctgagtacaagaatgtcccaccacgttgaatcttgtcaccaaccgtaattgggtccatcttgaagatatctccggcaactaaaccagcgtaaccataattgataccatagacttcaaggccttcatgcattgcttttcttgcaacggcacggatggcagcgttcataccaggtgcatccccaccacttgtcaaaatacctatgcgtttcatcttttcaccccaggcaaatattttacttaaaaaaccaattggtcttttaaagtcactaatatattatcacttttcagaaaataagtcttgtcttttgcgaagattttcgcaaagatagaccaatttctttattggtcaaacccttttaaaatcacatttcccgtccctaaaaggtttgtaagcgcggtcgttagtttttcgttgctcacaacccaatagcgctcgttcaatagaattgactgtttatcggccgcattgtacaagataactggcgttgttccgtgattttgttgtaacaattgatacatttgttgttgcacttgactcgtcaacgccgtttgaacccgtaaataaagggtcgctttgggtagcgtcttttgtgcatcttgtgccaattgaatctgattagcaaccacttgtaaatcgcgacgttgttcaactttcccggtgataaaaacaacttgtcctgtttgtagccattcactgacccgttgataaacgccagtaaagagcgtcacactaatttcaccggttgcatcttgccccgttacaaacgccatttgatcgccttttttcgttcgaatcaccttaattcggcgaatgaatagcaccaaatggaccgtttgctcgggtgccaaatcactgatatcaggcacatggtagtgttggcgtacacaatcatatttttcgaccggatgccccgaaacataggccccaagatattcggcttctttatccaatcgttcagtcaaggttaaattcggtacggcacgttctttcggtgctaaaacagcaaataaatcgacgttattccctgacaacttcacactatcaagcaggtcggctaagttggtcaacagcgcattccgattcggattaaactgatcgaaggcgccactataaatcaaggcttctaatgcctcttgcttgagaaacttaggatccatacgctgtaagaaggccagtaacgatttaaacggtccgttcgttgtccgttcttgaataatcgccgccacaaaatcgcgccgaacttttttaatgctgaacaaaccaaagataatccctgagtcggctaatctgaaataactttgactgcggttaatatcaggtggcagcactttaatttgacgtttcttagcttctgctaagtaagttttcgtttttgtcggattgttcaaaacggcatttaataaagctgcaaaaaaggctgctggctgatgaacttttaaataagccaaccagaaagcaattttactataagcaacagcatgtgaccggttaaatccataattggcaaaccgctcaatatagtcgtagactgtcgtagcagcagtttctgtgtgcccgcgttcgagtgcgccttgaataaattgcgtccggctagcatcaatcaccgccttcttctttttactcattgctcgccgcaataagtcggcttcgcctaagctaaagccccccatcttggacgcagcctgcataacttgttcttgatacactaagatcccatacgttggctctaaaatatcggctaacgacgcgtccggataagtgacaggttcttgcccgttcttacgagcgataaatacgtcgatgttttccatcggacctggtcgatacaacgcatttgtcgccacgacgtcttcaaaagaactcggtgccaaccgccgtaaaacattcttaatgccaagtgattcaaattggaaaataccattagtatcaccttgttggaataatgcaagtgttttaggatcatccaacggaattgagtgtgggtcaaacagctgtcccttttgctgtccaacaagctttacaatattagcaagaatccctaaattacgtaatcctaaaaagtcaatcttcagtaggcccagttcttccacgttgcccattggcaattgtgtaagttcaatctcttcaccgccactttgtaatgcaaccgtatcagttaacggtgcttggcttaacacaatcccagccgcatgcgttgagtagtgtcgtggcagtccttcaagtttctgtgctgtctcgaatagtaattgattttgagtggaatcggccaccaaatttttcaatggttgtgattgttgataagcttcttttaacgtgattttcagcatgtccggaattaccttagcccaatcattcatttcaaactgacttaagccaaacacacgccccacatcacgtaacgccattttagctgccagtgtaccaaatgtaataatttgcgccatatgattccgaccgtatttgtgatagacataggccagcacttcatcccgacgattatctgggatatccaaatcaatatctggcatattcgcccgattggggttcaaaaaacgttcaaacaacaattgatattgaatcggatcgacatcagtaatcattaaagcataggccaccaacgaccctgccgcagagcctcgccctgggcccgtcataatatgttgttcatgggcatgccgcatgacatcggcaacgattaagaaataatcggcaaagcccatctcgttgatcactcgcaattcatactgcaagcgttcttgatattcttgcggaatcgcttgatcggcaaaccgaacttgtaagccttgctgacttaactgttctagatatgccgttgccgactcttgatgcggtgtttcaaagcgtggtaattgggcccgcttaaaggtcaactcaacttgacagagttgggcaatcttatccgtattgtgcacggcctcgaccaactgcaatgcttcaaactcggccgtaatctgatcagcagtctgtaaataatagccgcctggcgttgtctgatcaccactatggagattaacttgcgtaccagctttaatatgttgtaagacttgcactgaaaaagcatcatctggttctagataacgaacatcacctaatgcaaccagcggaactccggtcgtctgactcaatgcaattaacccgctaagttggggggctgctgctcgcttggcactgattcctaagtacaagctccccggatcaactgccgcctggagttgcgtcaaatatgccgttgtttgctcctccgcttgcaaaagtaggcggactaattcgccatcttgagccggcgtgatcactactaaatggctgaaccactgtgtaatatcagcaaatgaaaccagatcagtttgagtcatcactttagaagaaagcttcaaaagattctgatagccaactaaatctttcgccaatacaattagcggaaaccgttcatcggtttgaagtaatccgccaatttcaagcgttaaacccaagattggatgtaagtcagctgccttggccgccttataaaaatcgactagcccataaatcacgttcttatccgtcagcgcaatactctgatagccgcgcgccttagcactttcaatcagtgcatcaattttagtggtactttccaagagcgtataggtactcttaacctgtagttgaacgaatggcaagcaacgccccttctttcttcgttaattcgattactcttagtataacaaattatttcaaatgattctctttggaaaacgtgttacaatatcatagaattgaatcaaagaaagaaggccaactatgaaatacgttatgaatctactttggacattgatttttgggtttgtcattggatttatcggttctaaactaacgaaaaccggctttaacattcaaacaactgttatcgtctcagttatttttgggcttttgctcaacttcttacctcttgtcttaccaaaagatccagctaaataaagcacaaaaaagggccgcaactttatgttgcggccctttttacgtttattttgtaatgtaaatatacaaatcacttgttgaaaaaccggtattgaacttcacaccatttgattcaatcgtcttcatcgtggtttgactaccttttttgtttttcttcgtataatcgctaaattcggacatcacttttttggaatcagcgcccgttgcttgcgcaatcaatgcaaaactggtcccaaaatctttcaatgccgctttatctttgagcgctttaacgggtgtaatgagcgtcatccccattacatcttgactatcaacagaaccgcgaatggtgacatgctttgttgcgacccattcagtcaccccatttttaggtgtggttggtagcaattgatccttttgtgtctgttgcacctgttgcattgctgcttgtacttcctgttgccgctgcttaagtgtcatcagatcagcaggtgcaagttggcctgctttggcagctgctgcttgtttttgcaattcctgcgctttggtttgatctgccttagataacgccatcccaattaaagcctggttgtattgcgcggcaatcttggcatattggccaactgatgtgcccgctgcaatcgttaccttcttttgaacggttttaccgtttgctttagcttgtaccgttactgtttgtttgttagtcgttgttggtacttgaatcacataagttccgtctttgaccgttgctttttggaaatgattatgattaatccggtattgtaaatcagcttttttggttgttgaaccttttacgactgccaccattccattttggcgataatttgttttagtcgttgttaatttggttgtcccacaaccagccaatagaccgattagccctaagctggtcactaaaccaacaattgtttttttcatattcgtcaccttttcattgaaatttaactcattgaaatcttagattaacccttttagaatcacaattcaagcgaaaacgacgaagtgtcacattttttaagaccaatcaaaaagagcgaccacttaacggccgctcttttaaaaacttattttaaatttgttttcttttcataacggttaaacatatataatgcaacaattgtgaagaagatagggccagcaactgaccagattgtttgacttaaattaccatcaattgctggttgaataatcgtaaagacgttcgcaaaaccaactgtgaacatgaccatgcagacacagaatttatagaaggtcttccctttataaattgtaaatggtttttcgatactttcatcctttttaaagccaaagtatgagtatgccacaaacatgtatggcaatgtcattgaaacgtttgtcatcgctgttaagatatcgaagaacttagcagcactcttaccaccaaaagcaacgaaggcaataatcacaattacaattgcagcttggaccttcattgcattgaccggcatattattactatttttcttagtaaatgacttaggccaaaaggcagcaggtgtcccttcgataattgtttttaatggtgagaaaataattgtaaagaaagccccactaagtgctaagaacattgaaagccccatgtaacgactgagccaaatcccaacttgaatagcagcatgttcacttaagtgcattgctaaccctaattggtaacccatgttgttcatggcaatataagcaacgttccccaaagtaacggttgcgtttgaaccggttgctttggcgaagccaccaccattggtaaagacgaagttccagttagtgaaagtccccatcataaagatcccaacagcatagccgacaacaatcacgacagcagaaatagctaacccttttggaaagttaaccttagcgttttcagtttcatctactaatccaccaacaacttcaagaccaccataagcgaagatcgcaaatacaacgaaactgaagacttgaatcatcgatgtatagctttgatttggtgattggaagaatgcatgggttgtaacaggttgtgccattacccctttatttaaaacaaggattaacaaaccacccaagaataaaatcacgttgattaacgtaatggctgaaccaccaatactggtgattctcttgattttatcaaggccttttgatgtgacaaaggtaatgacaatgatccaaataatagctaaaattcctaatgtttgcacaccatttgtcaaaccaaagattgaccattcttgtgttttatcaaccccgaaaaaggcgtttgataatggaatccaaatcccgttcccgacgttaaccatccagataatgtatgaagcaaaccacataaatgtgccgacaaaggcaaatttagcgttaacggatttctccatccaagagtaaatccccccctttgcttcaccaaaggccgctcccatttctccgagcataaatgcataaggaataaagaaggtaacagctgctaaaacataccaaaaaattgatgcatatcccatcaagtagaacgcacgtgggatattcgtaaatccaaagactgacgtaaagaccattagaataagcgcaccaagcgttaacttattcgtcttcttcttttctgccacctaaaacacctctttcatttttttcagacttaaccacaatgattaatcctctgaataaaaattagttaactaacatttgttaataaactaattagttacctttattttacggcgaaaatagaaagaggtaaacgaattcattatttttgtaattgaattatttgtgaatcttaattcaattctcattttctagtcaattacttattttttgctggcgttttttcttcaactggttctttcttcaaagtaatcccaattgcaatcttatataccacactctgacatgctaatttcagcaatgtttgttgggtttcagtgaccaatgtacctgctggatttttgccttggtcataggggctgtaatcctcatctaactgatgaatcgctgctaaaaacgttaagataaagtaatcataaagttgcttttcatttcggttaggtgtttccgctgtcatcaattgtttgatttcttcaatcgaaaaactcgttttcaatagtgcaataattaaaacttgagcaatttgcgattttgtataccgttttttaatcggtgctgccacaatttcttttttgacgtaattattaatcattgaagcggtgatttcatctaaatttaacgcgtttaggtattgattgatgtaactaaccacttgatccatatatagttccaaatcgggcaggtctgtccaacgtggtaagcgtacaatttgtaaacgatcgagcttttgtttcaagtgttcatttttcataattatcaatctccttttattcaatactcattataccaccatctagtatttaaaactaggaaactgcataaaaaaagagtttcttattcagaaactctcgatgacgattagtcgttagcttttggtgtaacaacttgttcgcctttatagaaaccttttggtgatacacggtgacttacacggtattcgccattagttgcatcgaattgtacgtttggtgtgttcaatttgatatgtccacgacgcatacgtttcttcgtctttgatgttcttcttgctggaactgccattattttcagactcctttatatcttagattcattaatgatataccgaactcggggaatttggcaaggattatctcaatcccattcaaattgattttaaatcatcacgtgtcccgctacttttgtccgcgacttctataatactatgtttatccgctaagagcaagtcaattacagaaaaacaattgattaacgactcttaatgacaccactttcaaagtggaatcgtccttaatcgtcactaacattctgtacatcatccctaataagtgtaccatacaaacatcaatctgacagtaataatccctgattgatgtccaaaaaaagcgccgcaaattaaatttgtagcgctttttcaatcgttagcgattttcaaaaactaactggttatcttttaagttaatttcaaccgtggttcctggtaacatatgcccggcaataatttctttagccaatggggtttcgatatggttcgtaataaaacgccgtaatggccgcgccccaaatgcaggatcgtaaccttcttctgccacccattgtttagcagcatctgaaatcgtcaatgtcaattcttgatctgacaaacggtctgatagatcatgaagcattttgaccacaatcgcttgaatatcgttcaagctcaatggtgtaaacataattgtatcatcaattcgattcaagaattctggcttgaatttcgtctgaattaaggcttgaacactttccttagccgtttgtgaaacttgaccttcttcatctacaccgtccagtaggatttcagaacccaagttagaagtcataatgatgattgtattcttaaagtcaaccgtccgtccttgtgaatctgtcaaacgaccgtcatccaacacttgtaataaaatgttaaagacatctggatgggctttttcaatttcatccaataacacaattgtgtatggattccgccgaactgcttcagttaattggccaccttcttcatagccaacatagcccggtgcggcaccgaccaatcgtgatacagaatatttttccatatattcactcatatcaatgcggaccatatgccgttcagaatcaaataaatcctcagctaaagcttttgctaattcggtcttcccaacccctgttggtcctaagaagaggaatgagccaagcggacggtctggattttgtaagccagcccgtgaacgtaatacagcatctgtcacagcattgacagcttgatcttgaccaattacccgttcatgcagaacatcggcaagacgcagtaatttttgtcgatcaccggcaactaatttggcgactggaatcccagtttgggaactaaccaccgttgcaatttcattttcagtaacggattcctgaaccatccagtcctctggcttttcagccttttcaaggtcggcaaggtcttcttctaattgtggaattgtgccgtgttgcaacttagcagccgtttctaaatcataatttccctgtgcttcttctaattgccgtttagcagcatcaatttccgcttttttatcattaatgcggttcaaatcttctttttcagtttcccaccgcatctttaaattattcgttgtttcgcgtaaatcagctaattgtttttgcgtctcagccaatcgtttttgcgaagcggcgtcggtttctttctttaacgcttcttcttcaatttcaagttgcattaattgccgcgttgcttgatccaattccgttggttgtgaattcatttcgacgttaatgttggcactggcttcatctactaagtcgattgccttatccggtaagaatcgatccgtaatgtagcgatttgacaacgtcgcagctgcgactaaggcattatcgtgaatccggacaccgtggaaaatttcaaaccgttccttcaaaccacgtaaaatactgatggtatcttcaacggatggttcttgaactagcactttttggaaacgccgttcaagcgccttatctttttcgatattttgccggtattcatccaacgttgtcgcaccaatcatgtgtaattcaccacgcgctaacattggtttcaagaggttcccagcatccatgctaccttcagtcttaccagcaccaacaatcgtgtgaatttcatcaatgaagaccagaatccgaccttcactcttcttaacttcctttaacacagctttaagtcgttcttcaaattcaccccggtatttggccccggcgattaaagtccccatatccagtgaaataattgtcttatcttttaaattatcgggcacatctttacggacgattcgttgcgctaatccttcaacaatcgccgttttcccgacaccaggttccccaattaaaacggggttattcttggttttccgtgacaaaatccgaataacatctcgaatttcttcgtcccggccaataactggatccattttgccagaacggaccgctttgattaaatccgttccgtatttttcaagcgcttggtaattatcttcttggtttttagatgtcacacgctcgcctcctcgtaaatcagtaatgactttctttaatttttgttcagtgacattttgtttctgtaaatattgaacgagtgcctggtatttcaaacccattaagcccaagatgaccgtctcagttgataaaaattcatcttggaattctgttttgtatttttcagcagcagttaatacttggtacaagttttgtgagatgttttgaccgtaattcgtttgaccttcaaccgttggaattgcgtcaatttcacgatcaatctccgcctcaagagcatcgatatctgcaccggcttcttggtaaatttgccgtcctagttgttgtggttggactaaatatttaaagaggtgtggaatatcaatttcagtttgatgacgcgtcatcgcgattttctgcgcttctgcaagtgcatcttggacagcttgtgtcatttgttctggattcatagacgtcattcctttttcagttattttttaaattaagtgtcagattattctgactaattctataatagtcaaaataggtcaaactttcaagtaattcgcttataaatcagacttaagacggagagctggtaggcgagttcttcctgaaaagtaacacaaaaaaagaggctaagacaaaatctgtctctgaagtgaacccccgatattggaccaaaatccaatatcgggggtttttatattgaccaaatattctaaaacattaaaaatcgtaaattgcaagaacaagttagccagtcgttgaggacaatcccagaacaggccgttatcaaatagaagttgtggcgctagagagactactgggccatgcggcgaacgcgccgagcttcggcctcaaagttttgctggggtgtgcagtagccctgttgtttgcgaggcaactgattcaagcggtcttgcgtggcctgcacttgactctagggctaatgtcatctagggacatgcccttagggaagtcctggcggatcatccggttatgtgcctcgttggtgccacggtcgcaggacgtgtaaggatgggcgtagaagatctcagtttccgtcccagcaaaagcagtatttaaggcggtgaactcgggtccgttgtcggctgtgatggtcttgatgcaagctccccattcgcgcttgattccacgcaatgcatagctcacagagtctgcatctcgtccttcgatcaagcggagaagttggcaacgggtcttgcgctcaatcagagtcaagatgacgctctccttgccattgcgtttaccgacaatggtatccatctcccagtgaccgaactgcctgcgtcgttcaacgaccttaggccgttcctcgatactgcggccagccaggcgcttagccttggtgtggtgctggtgagaggtcttccgcttagtcttctccaacaggtcgatatttcgaatctctaggcgttggtcgtcaatgtactggtacaaagtcgaggcacaaacaagctcttcaggagtaaacagcttgtgtcgcttggcatagccgattgaagcatccggcgaccatttgtcctgcttagctcgctgtacgtaccaggctaagaagacctgtacgctggcgaacttgtcaggacgatggcagctcaagcgtgcagtctcgtaacgtgcctgagcagcctctggcaggtattgtcgatggtagacgcgcttgccattactcttcttgacctgatctactgtacctcgcttgatttcattattaatggtctgcgggcagacgccaatttcagcagcaatccaacgattggacttcccagcttggcggaatccggccacttttccgcgctcgagtgatgttaagtgctgacctttttggcggtgtgtggtatcctgtttctgcatcaagacaatatcctcttccattgtttgtgtaggaacttcaatgatacaggatatctgttcttgatgttttttattgtgattaatataacatcatcatgtctcgctgctacataaaaaacgtcccctgaagaaaatataagacctttgtcatccttaccgtctattatgaatttgtatgctggtagaacttttgaagtagatttttctttattatccttcttaactagcttccttaccttcttaccacctgcttcaacaccacgaattattacatagccacctgctgccacaagagcaaggagttgctttggaccgcctaccttttttgcaactgttgtcattaattgataccatccaaggtttcccattttaattacctcactttaataattttttccaattgagtactgacattgttcctaaaatagtccctgcgataggaactagagcggcaaatacagagactagagctcctcctgtcactccacccgctgccgaagcagcaacttgttcgatagatttttgaacttcttcgtaagtgtcatcgtcaatccccacatcgctatctaaaagaatagtgctcttatgctagatttacggacagattttcttctgccctgtaaactaattgcatatgatcaactcttatctcttatatatttaatacaaatgttagcaaattttagcttgataagtcactaaagtatcgcttgagtctagttagggcattagtttaaccaaaatcaatttgatctaacatagtctctcgacttgcttgatccaagccaagataagtgagcgtcatggcctcacttgagtgattcaataaatgcatgactaagccgatattgtaatttgattgcgtataaacacgataagcacctgttttacgcatggtatgtgtacctagatagttgatgcctaatagatcaccaacgcgtgccataatcttgtaaaactgcttctcagtaatgtgacggtctgaatgggccgttgagggaaataaccaatccgaattaatgttttcttgtaccagccaatcatgatattgcagcaagtcttgttgcacgggctttaaatataatgtatttgctttaccagtctttttatcatgaataaaggccgtgtgtttaacagagccatctggattatagacatcggatttctttaacgtcatcacatcactcacccgcagcaaggtggccttgccgacttgaaagatagtgtagttacggcgacccgcccgaaaactatctaataaggtgtcttgtaccatttttaagacgttagagtcttttattggcagcacgatttgtgttgaaccatagattaacctttccagcttcttttttagggttattatatcatttataaaaaaaaagtccctattatctaatcactagataatgggggctgttttaatagtattctttaggggttattatgtaaatagcaacaaatatgaaaccgataatagacagtttaattattatgaataaacatttattacatagcatattataattcgtgtataattaaagaaccactcttattaactttttattcattgtttttcatattcatgtgaattgagaggaaaatttacttaaggagtaattatgaaactaagtagaaataccgtcattatggttgcagttctttcgctgttaggaattttcgttattatttttattttttttggacgtacacatacgacgaataagactcaaagactttaccgcattatgactacttcgacatcttcattgagtttaacgggtaaggtcgaatcagcggatgttcgcacattaaaattaccatccacaaacatttctaaattaatgattaaaagtggcgattacgttacagctaatcaagaattgttaacaacctttgatgacaaaacaggtgacatacagaagcagaaacaagaaattgacaagcaatcacgtctaataacccagtacacaaatcagttagctaatttaaaatctcaggcgacatctgaaaattcagttcaagatgcttcaacatcaattgcacaagttaacgactcgttaattgatgcgcaaactgatcttcaaaatatgaaaaatgacttgaataacacaataacttctcagtacaacgtcctaaaatctccaattgacggaagaattagtgtgcattttaaagatggtattccgtcattgacggtatattcaaattccaaaaacgcagtaggtgacgtatcggaatatgattactatgatttgatgaatagttctacagttaaaattgttgctcctgctacaaacaagacgacaagcaccactgtcggtgaactgaatttcgtatcaaatgatactagtaaaaatggtcaggctgaatactcattttcagcaccgatttcgtcagagtatctggatggacaaacattaaaaatattgtctactcatccaggaataagaattccgacgacctctgttgttgccaaaaagtatgtttatgtctacaaaaatgatggaaaagtatccaaggtccctattacgtacagcgagaaaaatggctatgcaattgttaattctggcttgcctgaaaatgtgaagataataacggatccggattcaaatttgagaaacaacaagaaggtaggtatacatgattgaaatcactaaacttattaagtcgtattaccgtggatcaaatcaaaatccagttttaaagtctattaatttatcgatatctaaaggtgagtttttatctattgttgggaaatctggtgcgggaaagtcaactcttataaatattttaggattgttagatgctgaattttcaggtcaatatcattttttagggttggatattagggagctatctgacaatcagttatcagaattaagaaacacaagcatagggtttgtgtttcaaaattttaaattaatcgagaatttgtctgtgtatgaaaatatagttctcccattgttatatgcagggaaaagtcgatctacattgcgaaaggtggtttctgaaacgcttgatcttgttgatttgcccaatttagaaagtaaacggccgaatgaactatcagggggacagcaacaacgagtggcgatcgcaagagcaataattatggacccagaaattattattgccgatgagccaacgggagctttagatagtaaaacttcccgagatataatgaatatcttcaaaaaaattaatgataagcgtaaaacgactatcattatggtcactcatgatttgcaacttgcccagcaaacaaacagaattattactatttcagatggcgctattttatctgatacaggaaggaattcatgacatgaaagtgattgaagtgttgttgacggcatggaagtccatacaaactaatctaaagagaagtttacttacaatggttggaatcaccattggaattgcttcggtcgtcgtgatcgtatccttggggaatggaattaagaaagagacgctaaagaatctacaagcagatagctcagggcgtcagactatagaaataacgtacacggataagaatcctaattcctataggcgaggattttctactgaagatatagagcttttaaaacagtctgacgaatctattgataaaatttcaattttggataataagaattcgttttcaaataaattaattattaacgggcaattgaaatccgcaacattccatttaactaaaaaagcgactaacgaaaatattattgtcggttctaacctttctaaggctcaagtaaattcatttcaacccatggcaatgatttccgattccgtcgcaaaaaagtattatgattctccgtctaatgcgctcaattcgtctttatcagtcgataatacgacatatactgtaacgggtgtctttaaaaataaaaaaaatgatggtctttcaacagacgtaatactgcccttaacgacatataaatctgcacagacaaaatcaactggagacacaattaaagtaacctttcaaagaaatgttaatatcgaaaaggccgcaaaaaacgtagtaaaaaatttaaacaagaatggcagccaaaaaactaatggtaaatatgaatatatagacatcggctcattacttagtggtgtaagcaatgttatctcaggaataacatatttcattagtgctatagcggggatatccttatttattgcgggaattggtgtcatgaatatgttgtatatatctgtatcagaaaggacgaaggaaataggagtacgtagggcaattggagcaaagaaaaaagaaatcatgattcaatttttgttagaggcggtaattttaactactttaggagggttacttggttttataatgggagcgggtctggcaatgattatttcccaattcttaccatttccggcagttattactgcgtcgtcttttgtcacatcgtttgtaatttctaccgtcgttggggtgatatttggaatattgccagccagacaagcggcggataaaaatttgattgacattttaaaataaaacttatttaaatgtcgatatgtaaaatgtagctaagagcagcaagaatcaatgtaacagattgttatattgattcttgctgcttttgcaaatctatacagtactatgttaatacaataacgttgagtgctttggaaagtagtcagacggtaaaatacaatataaacgaaaaaagcactaattggttcgccaaaaccaattagtgctatcggatacagtgattaggccactgtaacgacttgtcattttcggattaaccgaccatcaaattaagttattaggtccctcgggacctaatttcaaagcccgttaatcaagttatagcccctaaacaaacatcttttgtaaaaagccttttttctgttctttcaacaaatctaacttacgttgatgaagagtgatagtgttatctaactgtttgaagaatgaaccgattttttgttgttcttcataactgggaacagaagcaccaacactattaattacagttttcgataaactaggtacaccagtagattcatcaaattttttccaatttatttttttaaaaatagatagtgaaaattgaaggtcaatattttgtttaggaacagcgtaaaacaaggtatcgacagtccaaaaaggcgcttttaataaataaggcttatcaattgtccctttccttccgatcccaatggcatctatatctgatagcgctctatctacacttagcatatatccaccagttccatagacaggtattgatcccgaattcagatgtttgtagtcttttccagacttaacatcaataaaatcacctaacttacgctcttcccaatcgtcagcaaaccccgcaaatcgcaattcaggaactttttcaccatttttagggaacattttttgcaagtagccttttttctgttccttgagcaaatctaacttacgctggttagcagcgataaggttatcgagcttttcaaagaattcacccaacttggtttgttcttccggtgagggtagtgtaattggtgtttctaaaatatttttacaatctaccatttccacaagatagctttagcaatttcattcatactattaacttaataactataacaaactcttcattaaatacaaagattaatcgatattacacgcttctatatttgttgtacaattatctcattacgagtccaattgaggagcacccattcaatgcagtattttaaaatcctatttacaagtacattcacttttttaaagcagtcccaggcctattttcgtagtgtgttattgatgcatggctttttgcttttaatttgtctaccgcttttgagtaaagccagctacttcattctggtacataatcagatccagtttctcgcgttgagcaacttgccagcgcttattcatcagcatccgattgcgctgttagcactcgtaggaattgcgctactaattttattgctggctttcttcgaattcacgtttcttctattaagtgtgtactttattcagattaaacggccgctagctttgcaggcattgctgaagatgacttttgcgcaactcaggcaccttcgaattggcacgttctttttctttctatattattgtcttttaattttaccgctgggcgggcttggctatcattctgatttattgactaagtttaaaataccggcattcattctggattatattctcatgaatcggcgaattgtcgcgggacttttcattcttgtctatttgggcttattatatctcggcttacggctgatcttcaccctaccaaacatcattcttcagcagatgactttcaaaaaagcgttgaccagtagttggcagtttacacatcaaaaaattggctcattactggggcgtctactcttaatcggtgccgcactgattggctttacgggactcacttttttcctactcatccaactacaagcgttgattgaaacccacacatcagtgggactgccaagtgccgtggtcatcatgaccttgttgcaagctgctatgctcatcaacttggtgctttcaacagtcgccgtctttttcatcgtcattgattatttgttggccgacccacaatttgtgcaaccgacgttcaactatgcaaccttaaaattaagcgtgcagctcagtggtcgttggttattattcgtagcaaattgcgttttaatcggcgttgggacttataattgggactatctccgttcagtaaccattcagcagccgctaagcatttcccaccgtggcgtttcgcaaaaagacggcgtccaaaattcgattagtgcgctgcgaaaaactacccgattaaagcccgattatgttgaaatggatgtgcaattgactaaagatcaccaattcgtcgtctttcacgacttccaacttgccccactcactgggcactcagggaccccgcagtctaaaacactggcgcaactgactaaaatgaccgtccatgaacatcggcaatccgcaccaattgcttcatttgatgactatcttgcacgcgccaatcagcttcatcaaaaactactgattgaaattaagacacccaccaccgataatcccggcttggtgcaacatttcctgaataagtatcaggccaatatcgaagctcacggtcacatggtgcaatccttaaactggcacatcgtcgaggccgttaaaaaggcagcaccgaagattcaaacgggctacattctcccctttaattttatcggcccaccaatttcgaacgctgatttttatgccgttgaaatgacaactgtcaacagtcacttcattcaagctgcacatcaggaaaataaggccgtctttgtctggacacccaatgatcaacaagccgtccaacgcatgatgtatttcggtgcagacggcgtggtcaccgacaatctcaccgcggttaagcaagctaaacaacaaaataaccaacgacactacgccgataaactcgcatattatgtgatcggtattgggtaatatagtaaaaaaggattgggaatcgatatttttatcgatccacaatccttttttattagcgattctttctaagccaacgtcttacacttgaatagccaagcgtaagccccgttaagagcaatacaccagctgaatacacgaatccaatgacaatcaccgtcttcatcaagcctatttggcgaaccatgtcagcacaaaaagcagccatcaatcttcaattgacagctgcttgcactttatttgtctaaaagtcgttgtgctttttgggcggcgacgttcatgatgttccaaggacggtcaaaacctggttggaagaagaagtcagcgtatgctaaatcatcgattgtcatcttaccttgaatggcaagtgaaatggcgttgatgtttgccgtcacgtcagctttagacatgatttgcgcaccgagtacacgccgtgtttctggatcaaaggttaatttgaaatcgaccactggattttctgcttcagggacgaagtgtgggcgatatgtttcagaaaccaaaacagattgggtcttcacacccattttatcagccgttccttctttaatcccagttgaagcaaagtgataatcgaagacgctcaatgctgatgaacctgaaacagcgggtaccggttggttggcggtgactaagttcttagcagcatagcgaccttggcgacgcgcattcgttgctaaagcaattggcatttctttgccagttggtgcgtatttcacaaccgttgcatccccgactgcaaaaatatcgggttggcttgtttgtaagaattcattgatttcaatccggccgctgcggtcgagttgtaatgtatcttttaaccagcctgtgttaggccgaatcccagcagcttcgatgactaagtcagcatcgtattcagcttgatcggtcacaactttagttagcttaccgtcaacgccgacatattctttgacgccttgaccaactgcaggatagatattgtgcgcttgcatttcagccgttaattgatctgtaaattcttgatcgagatagagacttaatagacgtggcaagacatcaacaactgtaacatgtttgccagctttagcaaatgcttcagccgcttcaatgccaatataaccagaaccgatcaccacaacatttttaacggttggatcaactgtcttcgcctttaatttaatcgcccaatcacggccacgcattgcgtagacattctctaaatcacggcctggcactggtaattcaaatggtacagcgccgacactcaagactaacttatcgtaactttcttcacgcgttgtattattctttaaatccttcacttggaccgtatgttgatcggcgttaatcgcggtgattgcttgttgtaggttgacttcaatcccttttgcccgcatgccttctggtgtcgcataactgacatcatcaacgtttttgacggtcccttctaaatagagttgcatcccgcaggataagaacgataggaaatcgccttgttcgtaccattggatggttgcatccggataatcgagtaaactttcttgaacagtttcaaatccaccatgagatgaaccgacaacgataattttcacattgatcactccttattctattttacacaactcaagtataacgcagatgatattaattacaaataaaaacgcattctcggctgactttcaactgaccattcttaaattccatgctagaatagtgacaagctttacaataaaaaaacaatggagattgctatggcctttatcaaacgaaacttccccacttttatctatctagcaacactttatctcacctatcagattctaaatactttgattcgcatctttaccagtaccgatattctcgtctacgccaaagaatcattaactattttcatcgttttcttcggtattttctatttctcatatatattgttcggcgttggcttattatacgctggccacgtcatttcgaaacaatcgggcaactacgaaatttcactcatgattttaaacatcctcaccacttttagtacccttaccacgattattttaaaattttctggggcgcagatgccgcgtttcttactttcaaccacttttttcatcattttgaccaccatctcattagccacaacttccaaactgctacaactgcgcaccaagcgaattgacaataagtgactgccaaaggtgaagtagcgtctttttatgttaaggaaacatttttcatgaacggtaaaattgattactaccaactctttcaaacaatgtatcggcaatatgggccgcaacactggtggccttctgattcccattgggaaacaatggttggcgcggttctagttcaaaatacaaactggcaaaatgttgaccgctcgctcgccaatctacgatcaagtacgcacttcgagccaaacaatctgctttctctttcggatgaagcccttatgttggctattaaacccagcggcttcaataacgctaaaagcaggacaattaaagggctgtttcgatttttagcgacagttgattttgacttagacacgctcaatcagatgacaaccaccactgacctacggcgccagttacttgccatcaaaggcattggtccggaaacagccgatgtcattttattatatgtcttcgaccgcccagtctttatcgctgatttatatgcccgccgcttaattgctcacctagagcactgttctttaaaagacctccactatttaaaggtacaacaggttattgaaccacagctcttaccccaaatgactgttaaagactgccaagaatttcacgccctaattgacgatcatggtccagcctttcttgcagcacaaaaataagccggcatccgtttttagacggatgccggctttttaattatccaacaacccctttgcttgtatcagctgggtggaagagttggtcaataatacccgaaacgcgggttaaatcaacattcccgcctgaaactaaagccacaatatttttatctgttaaccattgaggatcaattttaccactcagcagtgctgccgttggtaatgcaccagcgccttctgtgacaatcttagtccgttgcatgagatccttcatcgcagttgcgatttctttttcggaaactaaaatcatttcatcgactagattttgaaccactgggaaagtcagttcacctggaatcgcaacgtctgtcccatcggctagcgtgaagtccgcatgatggctggtgattgtgcctgcttcaaatgaagccgtcatcccgtgcacgttttccgattgaaccccaatgatgtgaattgaggggttaaaggatttcaaagccgtcgcaatgccggagattaagccaccaccgccaaccggtacaatcaccgtatcaacattccaaatcgcatccaaaatctcaaggccgattgtcccttggccggccatgacttcgcgatcgtcgtaggggtggacaattgttaagcccttttcggctgctaactgctccatgtacaaccgcgaatcattaaaagtcgtaccatgtaaaacaacgttcgccccataaccggcggtcgcttgttgcttagcaagcggtgcttcttctggcatcacaacggtcgcatcaatccctaataacttcgcggtcaatgcaaccccttgcgcatgattgccggctgaagctgtaatgatgcctttagcccgttgctctggcgttaaatggttaattttattgttcgcaccacggaatttaaacgatcccgtcagctgcatattttccaatttcaaatagacatgaccgtgcgccacattacgactcaagaacatcgattgaattaaaggtgtttcgcgaatatacggtttaatggttgcccgtgcttcctcaatatcccggatatcgcaaatgtctgcggtttttaatactaattgattcgttgccattctggccacctcttccatttgaattgacacaaatgtctgcggataggttgtgctatccttcacaattaaatgtaagccacttatcaagcattgtcaaaacaaaacggccttaaattagaacgctttcatttggtggttattaagttctcattctagttgtttaaccagcaagatagcactagagtagccatgaaataaaatgatgaggtgttcaacatgaccaaatcagtcgttaactttttagctgtcattataatcgttcatttaaatcattttatctacaatgtgctattaaaaatagattaacgagcatatggagcactattgaacatctaatatccttcgtccaaaaataggtactgcccaatatccatccaaatgaacaataaataagccaattatagtcaattttcagctgatgcgcgcacccaaaagcaagccctgatacaataattttcatcaccgtatcgcattcgtttttttaataaaaaagagattaaagaaaataccagaaataataattcttctagtgttggtgcaaacaaatcattgctgagtgtcgtcaaaatcggaacagccttcattagctcattaatatagacttgattctccggcagcgctaatgggttccaacgtttatcgatccgatcaatcactagcacaataccaaacatcactaaaataagtacaactttctttagcatcggctctctttacacattttgccagtcaggttttggttgtctcatataaattctagtaaacaaaaagactattattagccacaccccaaaattaacagcaatcaatgctggttcatgcgtcgtcatataatttgtactcaacccgaaaagggcttccatatggacgaacatcattaatatcaataaaactataaaaaagctaatccgatggcataacgttccgatcttcaacaatttctttctggatcccctactaaactaataaccatatctaatcatcgataatgccgtcatttcttttaacttagcttgttgactggctgatagatccaagccttctttttgaatcacattcgcaattgcgatgttcattcggctcaaaattaatggtactgctgtcgtttgtgcttcaatttcagtttgataactatgcaaaactgattgtaatggtgccgcttggtcatcttgtttcaagtcgtttaataatgccttaatcattgtaattgcttgatgcccacgttcctgtccatctgcataccatttcatattcaatcgtcccttactcttaatcaactgttgagacaatcataacgcttatctacatcattgacaaataactaaaaaggaactataactagtgtgaattattgttatttggaggggtttaaatgataagtcaatcaattgcaaaagaaaacatccatacactttacaacagtctaatggcgcatccggataaatcaaatgcattgttagatattaccgatgttttactacaggtctacctcaaaattgatacggttaagaatcccgaggcactcgtcaatcgcctggccaattacatctatagtgttggctttggcaagattcatctcaccaaggatgaagaacacctattgattgatttaggcgcgtttggccaacgtgctggttggaacggcgtttatcgcggtgattatactgccaaagccgattttttcagctatgccgatgaacataaatatgctagaaattaaaagagtgtgacggaagtctgggatttcccgagcacgcttagacgattagatttgaccatcagaaaagggattgagacaaacacaacgtttgtctcaatcccttttttaggcaagaatattgccaatcccatggttaataatcgtaaattcagtcggttgtaaatcagtttgttcagtgacgattggattcaactggtcaatcgtaaacggcgaagtaaacggaaagccgtcaccgtactgattaaaataagtcacagtattccccagcacgcttttcaattgctcagaatcgattgcccgcgtcactgtcaccaaatacgcacgattgttatcgcccgtcaaagtggtgctcgtaaaaaatttaaaatagtctttcgtactcatcactgatccccccaatctttaatcaacgttattataacgctttcaaagaagcaattacagtatctttcgtcaattccattataatccaccatcattgcaattcatcaccgttacgccagttaacttagatacccataccacatcacttagtgattatcatcaactcaatccgaagaattacatcccagccttgcaaactgaatcgggcgatttcatgactgaatgcgccgttattttggaatacattagtcaccaaagttcgctgccattaatggcgaactatgccactgaacagtactggcaacaacgcatgtggttgaattacatcgccaccgaattgcataagaacttcatctcaccatttcgtaaaggcaattggctccccaatacacccgaaagccaagatttagtccgttcacgggttttcccacggatcgcttatattgaaaaagcgttagcgggccagtccttcttagttgctaatcaattcagtgctcctgatgcttatctattcgtcatgaccaattggtgtcgacgactcgcattttcattgactgacttccctaatctggaccgttttgatcaacacatgcgacaagacccagccatgcaatccgtcctcaaacaagaaggcaaaccacattcatcgaaagcttaaccaccaaaaaaggaatcagcagtcgctgattcctttttttaatgatttacatcacattaatcgtgacgtcaatattgccacgagttgcctttgagtatgggcaaatttcgtctgcttttttgagatacttcattgtttcttcttctgataaaccttcgatgtgaccgaaaagatcaacaccaatataataattggcagggccatcactataaagggaaacggtcgccttaatcgtgggttcgcctttaatatgttcttggttaaggacaacatctaaggcactgttaaagcaagaactatagccggctgcaaagagttgctctggatttgtactcttccctgatgggtctgtccctggtgacttgattacatatttctttgcttgatcgggtgaataaacgaagccattgcggcccccttcattaatcatcgttgtttcatattgttttgccatttaaggtccctctttcttttattgaatacccttactttagcacagcaaaattcagaaccataatgatttgtttatacaaaaaaggcgccagccaaaaaatagattttggactggcgcctttcttgttaatccttaggctataactggctgattattcacacgctatttaatataagccgtcttgtagctccattgtgcgccagctgtgttatgcacaacgcctttgacctttggattcttcaagtatgccgtatcattttgatagagtggtgtaatcccttggactttattcatgacttgtgcagccgtcacgaggtccgcccaacgtttgtcaggatcgttcgcatcggcattcattgcgcggtcaagggcagctttgtattctggattgtcgaagccaccggtattacttgcagcccctggtaacatgatttctaagaacgaaattgggtctttgaaatctgccccccaacctgcgagtaataaatcatagtcgccttttttatcacgactcgctgaaacttggcttggcacggtctttaatgtcaacttgaagcctggtaagactttttcaagttgacctttgagatattgaccaacatatgatgcgttggcatcatcggaattaagcgttaaggtgagggcaactttcttttgaccagtcgctttcagtgcttcatgccaatgtttaagcgctaatttttgattgtaatccacggtatctggcacggcttgtgatttagcaaagtccaccttcttaggggaatcggctaagcccactggcacgaaaccagtaatatcgtttttcttcgaaccgaatagccggttattcaacgtcttacgattaatcgctaacgaaatcgccaatctaaagtcttggttattcaaaagtgcttttttctgttcatctactgatttgaagttgtatttaatgtagttcgtcaacgcataaggatatctgtggaatgctttatcatcccgataattatcaatttgttgattatccaactgggttaaatccagtttcttttcctgataaagataaagcgcggtgctggtattttctaacacggtatagttgacttggtctaattttacctttttgcgatcccaatattgattgttcttcacaaattgccacttctcaatcgtcccattccagttaactaacttaaacggaccagagtacaccatgtatttcgcgtttgtcgcatacttcttaccatatttttcaaccactttttgatcctgtggggcaaataatggataagccatcaaggttttcatgtaggccacaggtgtggataatgtgacttccaacgtgtgctcatccactgcccgtatgccgagttggtctggtgccatctcaccttttgcaatcgctggggcattttggatattactgaaaaggtttgtataaggtgatttggtttctggtttcaatgtccgttgccatgaatagacaaaatcttgcgcctgaatcgggtcaccattactgaacttggcatcacgcagtttaaatgtccacgtcttaccatcagctgaaactgaactcgatttcgctaagcctggttcaattttaccgttctcaccaagccggaataaactttcataaatgttccctgtttgaccatatcccgttgaagtcgagatatcaatggtatctagtggtgcttgcgcgccaagctgaagaacctgtttggcttgcacccccgaaacttggcataataagaacaccccgaatataaaaattgcactaacactaagttttaagaactgccgccctctttgcatgacacgcctccttacatttaataagtagagtataccaaatcatcagtcaaaagttaaataataagcctaaaaaaagaggcctttgtaaaattaacttttacaaaggcctacaatattaattagacggaattctcgactgacggcacattctaaacgtgcttttcaaaccatgttcctgcgtttagcctaattagccaaataagcggcttcgccgctttttcgtctaattttgctaatcctcagaacataaacggtttgaacgcactcttattcgaaacgtgctttcaaaagcatactgctgtgcttagctacacaagtcaaatgattgctttcagcaatcattcgccttgttaggctaatgctcgcagtatacccgcttttgacgcactctttagttcattatttcaaacaattgttttctgaattctggaccatacatgactgctccgactgggatggcgaagtctagtgcttcgttaattttagtcgtccaggttggtccgaagcccccacagagttcaataaattgaatgccttctgccttcaattgcttagcgacttcaataattgaaccatcttctttagcacgtggatcgaacccgacggtaatcatctcgcacgttcccattggattacggttaatcaccgtattttgttcaggtgaaaagtctggtgaaaaatagaaaaacgcccatttatgcaaatttgctaatgccattgtttcgtcctccttgtttgctttcatcatagagaacaatcatgatagaggcaattttactgcctcttacagccagccattatgccgtgcaatctgaattgcttcaacgcggttgcttgcatccaatttgcttaaaatcgtcgacatgtaattgcgaaccgttccatccgataaaaataatgattcggcggcttgtttcgtactcaacccattagcaatcgcacgcaatacttccgtttcccgctcagacagtggattcttcgtttgcgttgtcagcccaacaactaattctggcgcataaacaactttgcccttcatgaccgaatgaatcgccacaatcaagtcatcactcgggccatcttttaatagataccctgccacttcggtgctgatagcctgcttgaaataactcggttgggcaaaagtcgtcagaataatcaccttaatctgtggctgacgcgtatgtagttggcgcgcaatctcaagccctgtcatgcccggcatctcaatatctaacaaaacaacatctggttggagggtttcaatctgatcaagtgcgacttgtccattgacggcggttccgaccatcgtcaaatcatcctctaaatccagaatgcccgctaaagcggtattcaatagttgctggtcttctgccaaataaagtttaatcatgcccttccctccatcttaagtggcaccgtcatcgtcaactgtgtgccccggcgaccatcgaccatcaactctccatcaatcgtttctaaccgttcgcgcatgcccacaatcccatgactcttatattgatcttcgcttttcaatccgcgaccattatcttcaatctgcatctgaaaagtcgttgcggttcgattaaaaaccacgtaacactccgttgcctgactgtagcgaattatattggtcacggcttcatgtaaacattgcgcaagcacttgttgattttgttgtggaatcccttcaagttggtcttcatttttagtcagcagtaaaatgcctgcaacgctgagattccgttcttgattgatcaattcctcagcaacggtcacttggcgtaaaccagcgacaatctcacgcactatttttaaattctgacgggaggcttgttcaatctcgagtagttgttcgggtaccgcggccggttttttcgccaataatttacgtgcatattccgcttttagcgtaatcattgaaaatgactgacctaaattatcgtgtaaatcccgtgcaattcgttgccgttcgttctgcttaatcatatcggttaatcgctgattggtctgcgttaattggcgatttttccgattgaaacgctgaatcgagctagccgcaaatggtgaaaagatgcagaacaagccgtacaccattaagccaatcagattatcgcgtcccatatgaccaccataataccaatatagggtgaccgctggtatgattagtgacaacagataagcgtagtaatagcgccagaaacttcggcggcgcatgggaatcgaaccaaacacccaggcagtataaatattcagataaaacgcctggataatgactgctaaaatcgcactggtcaccatttgtaagataatccagaatgtgcgataccgcgatgcgacatacccattgcgataagccaccaagaaaatcagaatcaagcccataatcgcttgctgcttaaccgtttgatacggaaacgcataaccaattggaaagagcaagaaaatcaaccaaacatatggaaataagccatattggggtggcatggcaatgtagcgtttaaaaaaattcatgcatgcatcgctcctcttttatgatggtttaagtatacgacaattgccagtaataacccagcccagagcaacgtgatgccatattcacccaagtgtgcgggttgatgcgcaatcagcgcttggccaatatgattaatcggataaaccggcaaatgcttgccaatcacgcgagctgttttgggcattatttctgttggccaccataatccccctaaaattgctaaggggaaagctaacaaactagacaccagttgaatctgattttcatcttttaaaaatgaaatgctaatcccaattaaacaaagggggatgctggcaaaccacaaccagcccgccgttaataaccaactggaccacactaaatgaatttgattactaatcccagcaactatgaaaatgacgccgatcgttaaagcattgattaagcctaagttcaacaacttagccccataataagtccgatgactggttggtgataaatcgattaaggaaaccaagccatcccgtgcgtcattataaagtaatgtcgataaagtaaacgtgttgctgagaactaaactataggtcgccatactgaccatgtattgtcgattgaatgctgcattcatcacaccctgtttcattactttcgtaaacaagagataaaacgcaatcggcattaagagtgaaaaaataacaaagcgtggattacgccaatatgcgcgtttaaagtctatttttgtttgtaccatcattgtttgcattttttagtcctccatcatttcgctataaatttcatttaatgagcttgcttgaacctgcacatcatgaacctggatccccatcattggtgctaattgacttaagatcggatcgctcttggtaacttgcaacagcaccttggccccagtcttcgtcacgcggatcacgcctggccattttgcaaaagtagctgctggtaaatcagtcgtaaagcgaatctgcgttcctttaaattgttgttgtaatgttgccaagtcaccatcgaattggaactggccatctttcaataataaaatccgggttgcaatgtgttcaatttcctctaaataatgcgacgtgacaataatcgtcttgccggcttcttttaactgttcaatttgctgccagaatttttgtcggctgccaacatccattccaacggtcggttcatccaagaatagcaaatccggattgcctgccatggctaaagcaaaggagaggcggcgtaattgaccacctgaaagttgggacaccatcttatgagtctgtgccttcaaatcagctagcgttaataattcagcgactgaccgtggctgttgataataactgcaaaccaattctaattcttcgatgacactgacccgatccagtcggacatttccttgcatcatcgcacccaataagttgaaatgttctttctccgttggcttctgacctaaaatccgaatctcgccagccgttggttggagtcggcctaaaattaaattaatcaatgttgacttgccggcgccgtttgcacccactaagccaacaatctcaccaggttgaacacttaagtctacctgatttaaaacaacttgttgttcgaattgcattgtcactagtttaatttcaatcattgtcatcacctcatttaataaccctagtatagaagtgattccgttttgtcgttagacgattttgtcatgacttacagatgacaaatgtcatgtctttggtgttaaaataaagctgattcgttttaactcggaggttttaattatgacaacaagccaaccagcagcaccatcattttttacgaaccggtctacccaagccatcgcgcaagatttattaggaactcacttgctttataccagccaccaaggcacacttggcggcctcattgtggaagcagaagcctatgtcggcaccgatgacactgccgcgcatgcttacaattggcgccgcacaccctttagcgagccgctctatcatgagcctggtacaatttatatctatcaattacgcggtttctttctatttgatatcgtgacccaagcagtggatcaaccacaaggcgtcttgattcgcgccatcgaaccgacccacggcattgaacaaatgcgcctcaatcgcccgaaacctggcgtcgaactgactaacggccccggtaaattaatgggcgccctcggcattcacgataaacaactgacttttcaaaatgtggcggacgcccctttaatgattgatttagcgcatcgtcgccaccccaaatcaattgtcaccgcgccacgaatcggggtcaattataaagcagcgagtggtcaacttccttatcgctattatgtcgctggtaacccgtatgtgagtggtctgcctaagcgccagtgggacttagaacaacacggttggcaattttagcgccaatgtcaatttttaattgaaaacgatttcaacaatgctataataatcttgtgaattaaataattaagttagaagatcattgcatgaaaattaaagcagctgttgttgaacaacaaggcgcaccatttgtcattaaagataacatcgaactcgcaccactccacccagacgacgttcaagtccacatggtggctagtgggatttgtcactcagacgaagcgcttcgtaaaggcgacgccattattggctatccaatcgtcctcggccacgaaggttccggaattattgaaaaagtcggttcaaacgttcaaagtttaaaagttggcgaccatgtcgttctctcattctacgcatgtggcatctgtgaaaactgtctcaaaggcgttccaacacaatgcctcaactacgcagaaaataacttatccggcgtgcgccctgatggtagttcccactttactgaaaatgaccatcacattgccgatatgttcgatcaatcttcattcacaaccacaaccgttgtccgcgaacgaaatgcggttaaagtccctgacgatttagacttacgcaaactcggaccactcggttgtggatacgtgaccggtagtggcactgttttaaatactttaaaaccaaaacctggcgacacaatcgccgtcttcgggactggtgctgttggactcgcagccatgatggccggtaaaatttcgggctgtacgaaagtgatcgctgtcgatatcatcgacgaccggctcgcactcgctaaagaactcggtgcaaccgatacgattaacagtcgtcaaacagacgacgttgtcgcagcaatccaagccctcacaaatgggcgcggcgtgaacttctgtgtcgataccacggggattacaccagtcatggaagattcaattaaggcgctttgccaaggtggggtgtcagcaacaattgccgtaaccccaaaccacatcgatcttgatacttggaacgacttatgtgtcaacgacaaatccgtcgtcggcgtcaacatgggtgactccattccgcaaatcgacgtccctcgtttaatcgaattctaccgtcaaggcatgttcccctttgataaaaccgaaaaattttatcaattcgaagacatcaacactgccaacgaagcctctattaaaggtgaaacaatcaaacccgttttgattattgacccggactatcaattctaagcaatcaaaaagaccgcttattcagcggtcttttttaatttttctgacgccaataatggccaagtgttatcaacatcatcaagacgattattcctctgagtaaccaaagacccaatagcgcgccaaacacaatggtaactgcagacactaatggcttttggaaaataaacgcaaaccctaatataataatcaatactggcatgcagtccagctccttttctttttgaaaattgcatgttaaatttaaagcaatcatatgaagtgaggtgttagtagtgccagctattcccgataatctacttgccgcgaccatggggcgtaaactcgctacggttcgtcgtgcgcaaggcttgtcccaacatcaattagcccaggatatttgttcgcaaccgatgattagtcatattgaaaacggcacttatattccaaacgccattttgttagcaaaactctgcgaacggcttaatatgccgttagaacaagcgctgttaagtcattatcccgaaattgatcaacaacccgaattcaatcaacaaattaaacaactgtgcaatgcacacgattatcgcggtatgttagattatttggatacgactggcttggccgaacaccttgaactggcgaccgatttacagacctactactactatcatggcatcgcagtattccaagaacttcatacaaccacggatagtttacgggaactacaaatggcactcgactatacgtttacaccgcgccaacaagttttaacgcctactgagattttgattctcagtagtatcagctttattaagagtacaccccatactaatcaaactgacttcgaacacgtcctcgcaattgtgaatgcagggcggttcacgcactatgacgagaacattaatatcttattctacctgtatagtctggcactctatcaagatcaccactttcaaaaagcttttgccatcgccaatcaaggaattgactggctcagcaatcatgattcacactacatgttagccgacttattcttgctagtcgcctgtacaataaaaaaagagctacgacaaaaaattgacttttgtcgtagctcttttttgaaattctatatggctcattctactgcgctaataattgtccaattcttgatttaaattcagttaagaaacgcggcgtatcaacttgtacacaaaccgccgtccgcgttgctggatcatctaggcgggcattatccccaattgttcgtccacgtgacgggccttctatctcagtcttcaagttcaatggggaagtcgtgactaagctaggatcgattgcaacagcgactgctaagggatcatgtaaggcacagccgtgtaaatggggagaagtgacttcataggctttgatatagtaatcaaccatatcggcataagctttggctgctggtgtaccgagtgcgcgccattctgccgtatcggtgcgtgtaaaaagtgtgcgcaacgtgacatcaaggcccaccatcgtcaccggcaaaccactcttaaagagtaagtccgccgcttcagggtcttgactgatattagcttcagcaaatggagacacattaccacaaactgttaaggcgccacccataatcacgatttgaccaactttcttcaaagttagtaaatctttttgaatcgctaacgctaaattcgtcatcgggccagttgccacgatgctcaagtcagccccatacgcctgacaagcacgtaatataaaatcaacggctgattcagttgccatttccggatggggctctgtcagatgaatctcaccaacgccgtcttgaccatgaatttccgcactaattggtaagacgctaaaatcatgcgtcgtcgtcgaatgcccagcccctaaataaactggaatgtctggatgacctaataaatgtaaaatttgttgactattcacaacgcttcgttcagtcaaaacgttgccgtattctgaggtaatcccgattaaatcgacttctgatgatcccaatgcataagcaattgctaacgcatcatcaatcccagtatctaaatccaaaatcattttttgtgccacgccaagccctcctcaataatcatgcaaaataatgtacaccacaagtgtaccccattatcggggacgggtaaattaataatctaaggattaaactcaaaaaagacaagtagattattctactcgcccttttcgatgattcagtttagaccattgatttcatgatgcattaaaatcgtttgaccatctgactgagtcttattttggagccgatctaataacaacttagcaactgccaatccaatcgcttctgttggcggttgaatcgataggattggcaactgtccaaattgatgttcatcggcataatcatagtgaccaaatagtaaatcttggccaatccgaataccattttctgataaataagtgagcgcaccaaaggccatattatcattgctgacaaataaagctgtaataccttcggctaataatgcttgggcaccgcggtacccgctagtccgagaatagtcaccttcaaaaacatgtaactgtctgtctggataagctgccatcgtctgtttagcacctgccagtcgttcacgggcaacataatcatcctgattagcggcaatcatcccaatattctggtgtccgagatcaataatttgttgcatcacttgtgccacacttgcgcgatcatctaataaaatcgaatcaacattgcgtagctgatttgggttattaatcgtcacaaccggaatatcaagtgccgctagtcgttccattccttgccattcttcacctgctaagaaaacaattaaaccatcaatcgaatgcgccattaaataatcaattttttgatcaattaacgctggttggtcactaaaaccactcaataataaactatacccttgttgctcaacgcgttgttctattccagaaacaacttccgcgccaaatcgacttgaaatactattcatcaataaaccaattgaaaaactttgattgttcttcaatcctttagcgataatattttgtttgtaatcgagttgctcaatggccgctgcaatcttggcttgattagctgctttaagctgttgcccattcagataccgtgaaacagttccgaccgagactccggccaattcagcgacttctctaacagatgacattcttattccccgcttatatcgataaagtgattttctccgctaaatcagcaaccataatagtcgctgcttgcgcacgtttcacctgattatcaatatccatgtaattaaaatcagcagcaggtagttcgaaagtaatgctcttttcttcacctggttggaaggcattcttttggaaagcttttaacagcttcattcgttgaataactgctccaccagttaatttgacaaataataaactactttcttgacctacaaactgtccgttattttttactttaacagttacaactagtttgtcaaccatttgcttaaccgctaattgtcgataatcaaattggtcgtaactaagtccgtaaccaaatggatataacggttggccaacctcatcatagtaatcatcttgtttagcagcatcgcgttgatagtagtaaaccggtagttgctgggtattgcgcgggtaagacacactcaacttaccacttggattattaagtcccactaaagtttcagcaattacgcgaccaccttgttgaccaggaaaccaagcaatcaatacagcatctgcaagttcatttaccagtgttaaatcgtatggccggccttgcaccatgacacatgcaattggcttgcctagtgctttcaattgcttgagcagcacttcttgttggcccacagactaagtgatgcgacatcaacattttcaccagaatccatgttgatgccttttgaactcactgccccgttacttaggaaggccatatcaaaattacgtgcactggaaccacctaatacagggatgattaaatcggcatcgcgcgcaagctcaactactttggcaattgcctcttcttgatgaattgaattacgcacctcacagcctaatgcatacacgacttccgactcgggaaacatttcttgaatcgcttgataaattgtttgcgcttgacgcgctgaactttgtgctgctgtataatcccccaagagattatataattcatcagcattggggccaatcaccgcaatcttttgcggctgattccggattggtaaaagcccattgttcttaacaagcgtcatgctttcacgtgccacttgcagattcagcgcatcagctttttcaagcaaggccgtcaattgcgcattcggggcttgtacatagggttgttcaaacagacccaacaggaatttcaacgctagtactcggccagcagcattatctaaggcagcttcgtctactaggccattttcaatggcttgatcaagcgttaggaatgtctgatcccataaacttagatcgacacctgcatttaaggctgccgccgcagcttctggttgtgtttcaaagattcctgataaccgatcaagcgcaacaccatctgccatcacaatcccttgaaacccatttacatcccgtaaatcttgagtcaacaacggctgattgatatgacacggtaccccatccacatcgttataagcagccatcacacctgccgcattcttgacactactcaaaaggggttcatagacgtctgaaaattcacgttggccaattgtgacggtgcctgaattatggccacccaatgcttcaccttgcgcaatacagtgtttcaatacaacaccaatggcatcagtcgttcgcggtttagcaggttggtctaagaaagcaacatcactttgaattaaatccccttgaaaacccgccacaacggcttcactcattcgcgccgctaaaatgggatcttcaccaaaacattcttctgaacggccccaacgtggatctttgaccaaatcaagcgtcgaaacaagcgctaggttaacgcctttaagcgctagttcttgtgccatcagatgcgatgattgctgcattaaccgcgtattaaacatattgccgcggccaatattcgttggatacgagattccttcaagcccttgatggccatgaggacattcttcaacaattaatgctggaatcccccagcgtgaatgcgccatgacatattcttgaactttattagcaactcgccaactatcctgtgcacgaacgccattttcaaagttcacttttgaccatggatctgcgcgaaataaaccataaagtgcaccgacaccgccgccccattcaacatgcgccttgaatttttctgtaaacgttaatgactgagaatcttcgaaagtttcccatccataaagatgttgattcacttgaccaattttttcctgcgtactcatgcgtgaaagtaaataagtgacccgctcacgaatggtcagcgctgcgtcttgatatggatactgcatttcaaaaacctcattcctcagttaatactttgttacttgcaatgacaaatggtaagaataaaaagacatctaaaccaattaataagatggttaaaatcgctgctcggtaatcaccgccagttgccaagaaagattgaataacaggcggtgtaatccatggtgcagccgctaccgttttactaatcaaacctaagcttgttgcaaaataagcaatcactaaattgattgatggaatgatggcacatggaatcatgaaaattgggttcataacaactggtaacccgaacataacaggttctgtaatattgaagaaacaagttgttaaccctaatttagcaacttgccgttgatctttccgccgtgaagcccataaaatagcaatcactaacggtaaaatacagccgcccccaccaatcaagccgaacgcatttgtaaaaggttctgtaataatatttggaatcgcatgtcctgctgaaaaagccgccatattttcttgaatggcttgtagcaatggtgcttggcgaactggtgctaaaatgctagaaccatgcatcccaaagactcataagaaatctgagaagaattgtaagaataacgtacctggtacagataatacaaacgattttagtggcgtttgaatcgcaaggtcgattaattgagggacgttcaacccggttgtcacatttaaaataaatacaaaaatagcaaaaatcaaaacaaccaagacttctgggaccaatgaattaaacgaggttgcaactgctggtggcacgccttctggcatcttgattcgtattttttcaaactttgtaaaacgaatgaataactccgtactaatcaatgctgctaacatcgctgttgcaagtcctgatgacgaggttaaactttgcaagaaaacgcctgttgcttccgccgttttcccatttgctaaagtgacggtactcgtcacaggcatcaaaataaacattgttgccaaacttaaaataccagcatgaactgcactaaatgcaggatcgttcactttcccagagcgaacataatgcgttgctaaattagcaccgatgttataacagaccacaattgataaaatactcatcgtcccattattcacaattgttgctaggtcagctaatccacttaaatcaacaatcttttgaacagcggcgtttgagaaaattagcgcatttaataaaaccataagcgaggccgccataacaagtggcattgtcacaatgaagctatcccgaattgcaattagatgccgctaattattgagtttagaaacaaacggcaacatcttttctgacagtttatctacgaatttcacagtcatttctccctttattgaatagaattgaaccggttcaatttcgtataatagcacgcgattatcattttgacaatagcgcttacaaatataacctaaaaaagattgagtcctcctcatgaacaactcaatctttaaaccattgacaaaggccacctattcctaggtggccttctaattaatttcgcatattaaattcttacataatgtcaggtagccagtcactaattggctacgcacactagcatcgaatggctagtggagatgacgtgtgattcacgtcgcttttatttttgggttaattcaattatgtctaaattcttgtgtttctaaatatcttctcgtttaaacagcgtaagccgcctctttacactacttgtaactccatggttactccagttgattaaagtcttcaaataatacttgatactacagtgataagtgctgattaactttcctaagtataccatattttcagttcgaacacaaaatgaccataatctttctgaaaagaggctttccatttgaccaaaattgacctttgctgtaaaattcaatttatagactacagagtgattctactctggcttatataaggaggcaattcaatgttagtaccgacagttatcgaacaaacatctcgtggcgaacgtgcttacgatatttactctcgtttactaaaagaccggattatcatgttatctggtgaagtgaacgaccaaatggctaacacaatcattgcgcaattattattcttggacgcgcaagattcagataaggacatctcaatctacattaactcacctggtggttctgtgaccgcagggttagccatcatggatacgatgaacttcatcaagtctgatgtccaaacaatcgcaatggggatggctgcttctatggccagtgttttactctcagctgggacaaaaggcaaacgttttgcattgcctaactcaactgtcttgattcaccaacctttaggtggtgcacaaggccaacaaactgaaattgaaatcgcagcacgcgaaattttgaagactcggaaacgtttaaaccaaattttggcagacaactcaggccaaaccttcgaaaaattacaagctgacactgatcgtgataactacatgacagcccaagaagcaaaagactacggcttgattgacgatattatggtcaaccaaccaaaatagagtagataataaaccggttctcttctggggattagtaaaaaaaaggctagatcaagttgatctagccctttttttataccaaatttgttatactggcagtatcttaaaggagggtcttccatggatattagtgtgattaaaagcgagaatgtgacaaccaccggcggtattacaattggtcagccagatgcaccattaacatcaattgaatttatcaacgccgcttgtccttattgccgcaagtggtttttaaaatccgaagaaacgatgactgaagcagtcaaagctggtcggctaaaacgtattatcaaaccttttgataaggataaagaggatctacaactggggaatttagcccatacctatttaccttttgatcaacccgaaatagtgctgcaaacactatcattcttgtttacgcatcaaaaaacatggcgtaatgatctgacaccagatgaatttaaaaaatacatcgatcaaaatctcaaattaacgccacaagataatgcagaaaatttagccgcaattattgctgaagccgatcgtgccaatattaaattcgtcccgaccatcattattggtgaccatatctttgatgaatcaattgatatgactgacttaagtcaactactaaaataaaaaacaggtgcccccccctcggggcacctgtttttgtatgtacgataaagggttccaaaaaattcaatttaccatcaaatcttttggaaccctttatccgtcattttatgaaaaacgtgcattatccatttgaatcgcattcaaatgatgttcaacttcattcatttcttgacgtaattcatgatacttatcgcttgagaaatcgagatagtttgtgcaagcaccaacccgttcgtagatttcttctttttgactttctgctttttcagttaaggtaacgtcaactcggcgttcatcgtctaatgcacgattccggcttacccaaccatcagcttctaagcgtttcaaaagcggtgttagtgtcccactatcaagttctaaatggtgccctaattctttcactgacatcttgccatgttcccacaatgcaagcattgcgatgaattgtggatatgttaatccgtaaggttttaataccttaccgtagaaatgattgtaagccttttgtgcgcggtaaatcgaaaaacagagttgttcatctaataatactggtttaaccatataattttcctccataaaatgtccttcagttattgtacttaattatattgtacaagtcaaatattgtacactaccgatttattttgccccttatccattcccctgttggtgggcttcggcaagttgattcaattttctgagccgatgattaatccccgacttcgaaattgccccactcggcattttttccccaagttccttcaacgtaatatctggaaattccaaacggagtagcgcaatctcacgcaacttcgccggtaaattatctaatccgacggtgtcgcgcaagtattcgatattttcgatttgttttgtagcagcatcaattgtcttattcatatttgcggtttcacaattgactaagcgattaaccgaattacgcatatcccgcacaatccgaatgtcctcaaacttcaacatcgcgttggtagcaccaatcacttgtagaaaatcagcaattttttcagcctctttcagataagtgatgtacccactccgtcggaaagtcgttttggcatttaagccaaaacgattcatcatgcgcgcaatatcttgattatgctcttcgtataatgaatagatctccagatggtaccggcttgtttcaggattattcactgagccaccggctagaaaagcgccccgcaaataagaacggacgcgctgatcttcattaatgacatcttctgacacctttgtatgaatggtaaaaccgtcctcctcaacaatatcaaggtcttttaaaacggtattggtatcatactttaagcgcacgatgtattgattattcttttttaacttcattttgcgacgtactagtaattcggattcaacttgataattttgtttcaataaactataaatccggcgagcaatcgccggattctcagtttgaacgtttaaaacaaattggtgattcatcaagctcagtgacccattcatccgaattaaagcggctaattccgctcgtgcatgttcaggatgcacttcaagttgcgtcagttctttcttcacttcacttgcatatgaggccacgattattcacctcgcttagctgtattgacctggaaagcaagattcataatttcactcgctactttttgtccattatggaacacaccatgatctttcaacttcaaaaagttatcggaaatcactcgacaacccaatcctcgtaagccatcaaagtcatgttcaaccggccagagaatttcgtcgtacttttgatgatccaaatagttttcagggacttgtgcggtattaaccaaaaccgtgtccacgaagttctgaccaagatgatcattcaacacgcggacgtgatcggcatcggtaaagtgttccgtttcccctttttgcgtcatgatattacaaatgtaaatcacttccgccttagtttgcttgactgccgcacctaagtttttaatcattagattcggtaaaatactggtaaacaaactgccgggtcctaagacaaccacatcggcagccaaaatcgcatcaaccacttgttgaacggcttcgggtgctgcagtatcatcttgatccgtttttgagacccaaacacgcttaatctgcttgcgtgctgcagtaatctcagattcccctgttaactgggtgccgtctttaaattcagcattcaacgacagcgcaacattggccgcaggataaatatgaccgtcaaccgccatcatttctgataaccgttgaacagcatcaaaaatacctgattccatttcagataacgccgcaataattaaattaccaatcgcatgccctgagaaaaaggcatcgtgtgatttaaagcggtattgaaaaatatcgagcgttaactgtggtaaatctgacaaggcgactaatacattccgaatatcaccaggtggtaccacgttaatgtaatcgcgaataacgccggatgaaccgccatcatcggcaaccgtgacaattgccgtagcatccgcattctgttcacggagactctttaagataacgggtagtccagtgccgccaccaatcacaacgacttttggtcgtcgccctttaatgacccggataatccgattagtagctgtcatgaccggttaaccgtttccttgcgtttcttcatatcccggtgggtcacgtcaaccggataatcgaacgataaatcatcagccaatcgttgggcaagcgctactgaacggtgttgcccgccggtacagccaatcgcaattgtcacacttgttttgccttccttgagataacctggcatgatgtcttttaacagcccactaaattgttcgtagaacttttcagtcgctggctgcgccattacatagtctctaaccggttggtctaaaccgtttaattccttaaatgctggcacatagtatgggttcggtaagaaacggacatccatgacgatatccgcatcaattggtaaaccgtatttaaacccaaatgacatcacttcaatatggaatgacggattatctgacgtcttgaagacatgaaaaatcttttctcttaattgtcgtggtgacatggttgaagtatccaccaccatctgtgctcgattgcgaatttcagttaacaggcgccgttctttttgaataccgtccattaaacgcccctccatcgctagtgggtgggaacggcgtgtttccttgtatcgcgaaaccaattcctcatctgatgcatccaagaagagaatcttagtcgtcacgaattgggtattatcaaggttagcaagcatttcaatgatctcatcgtaaaaagcacgtgagcgcaaatcaatcactaatgcaatcttagtcactttgccggactccttaaccaattcccaaaacttaggtagcaatgtcggtggcatattgtcgacacaaaaataacctagatcttcaaaactttgcatggcaacggttttcccggcaccactcatccctgtaatcactactaagttcaatgtatctgtcatcagaccaccccttaagttttcgcttttatcattgtaacattcctggtgtgtcattgaaagctgtcgaaactctcgacacgtgttatttaatgctattaaaccgagttcattcctaatgtctaggcatttgaaagagcttattttttccataaaaaaaattgcagaacaatcaaattgttccgcaatcattaaatttagagactataaacgtcttgcaaatgcgatgatgatggcattaatcccaaagaaagcaaagtaaaaaccaactagggtcaccatcgttacggcagtcaccactggatccattaacaataagatcccaacgattacgcctaagatattcagaatcatcgaaacgatgtataggcctgtgttaaattgcttgagatggccgacattcaataatgccacaattgaatcgaacaagaaccagaatgcaaagatataacctaaagcagccactccagctggaatattcaagataaacaaaattcccaaaatgacatcgacaatggcatcgaccaacattaacgttgcgcgcatccctgtctcttgacgtaaccgactatatgcactgattttggcaattccccgaataatcgccgcaatcgcaatcacgattaccaaaccagataatgtcttacctggttgattaaacaagcaatatgcaacgattaagaaaataatccccgtcataaattctgaccaatcaaagtgccattcattttttctaaacattcccaatcacctctcgttgttaatacctttatgatactttttttacggacaatctacaactaaatttgacaaaacaaaaagtgggcggttaaaacagcaatcattctgtcttaaccgcccgctttttaaacacattctatcaaccatcttctggttaatcctgagcggcaattgtgcgtgctgtatcgcgttctaaaacaggttttaaatattggcctgtatagctttcactgacgttggcaatttcttctggcgtaccggtcgcgacaattgtcccgcctttatcgccgccttctggtcctaagtcaatgatgtgatcggcagtcttaataacatctaagttatgttcaatcactaagatcgtgttaccttcttcaactaaccgttccaaaacgcccaacaagcgcttgatatcgtcggtatgcaagccagtcgttggttcatcgaggatgtataaattcttacccgttgattgtttctgtaattcagaggccaacttcatccgttgggcttctccacccgataaggttgtggcagactggcccaatgtgacgtagcctaagccgacatccacaatcgtttgtaacttgcgggcaatcttgggaatgtttgcgaagaagactgtggcttcaccgaccgtcatgtctaagatttcggcaatgttcttgcccttatagacgacttccaaggtttctgaattatagcgactgccatgacagacttcacacggcacatacacgtctggtaagaaattcatttcaatcttgataatgccgtcacccttgcaggcttcacagcggccacctttaacgttaaaactaaaacggccttttttataaccgcgtagtttggcttcattggtttgcgcaaacaaatcacgaatattgtcaaagacgccggtgtacgttgctggattactccgcggtgtccgaccaattggactttgatcaatattaatcagtttttcaagattctgataacctgtaattgttttatattgacctggttttgctgagttacggttcatcttttgtgccaaagcttttttcaaaatcgtattgactaaggttgacttgcctgaacctgaaacaccagtaaccgcgacaaattcacctaatgggaaatcaaccgtcagattcttcaagttattttcagccgcaccggtcacgcgaatcttcttgccattgccttgacgccgttctagcggtactggaatatattcggaaccggctaaataacggcccgtcaatgatttcggattatgttcgacttcagttggggtcccagcggccatcacttcaccaccgagttcaccagcgccgggcccgatatcgatcaggtaatcagccgcgcgcattgtatcttcatcatgttcaacaacaattaatgtattgcctaagtcgcgcatcttcttcagtgacccgatcaaacggtcattatcacgttgatgcaaaccaattgacggttcatcgaggatgtagagcacgccagataagttcgaaccaatttgcgtggctaaacgaatccgttgggcttccccaccagaaagggtcccggctgaccgactgagcgttaaataatccagaccgacgttaatcaagaaagttaaccgatcatgcacttctttcaagattggtttggcaaccacactgtctttttcagaaagttcaagttgatcgaagaatggtaaagcttctttgatggcgttgtctgaaacggcaacgatatcttggccgcccactttaacagccaaagcttgtcgatttaaacgagcaccatgacaggtttgacacgttaattcagtcatatacgtccgcatttgcgtccgtgtgaaatcactattggtttcacgataacggcggtcaatattggctaatacaccttcaaacggcacgtccacatcacgcacaccaccgaaatcattttcataatggaagtggaagttcttaccctgagaaccatttaagataatgtctttttggcgtggtgttaatttgctaaatggtcgatccatgtcaattttaaatgacttgcaagcttgttcgagcatctgtggataatattgagagctaattggattccaaggcgcaatggctccttcgcgcaatgtcttgctggtatcaggaatcactaaatccatatcgacttctagcttaacccctaaaccatcacagtctgggcaggccccaaacggtgcgttgaacgagaacaagcggggttctaacgcgcccaccgtaaagccacagattgggcaggcatagtgttctgagaaaagtagttgttcgccaccgatgatatcggcagtcgcatacccttctgataagcgcagagccgcttcgaacgagtcaaataaacgggaccggacaccgtctttgacgacgattcgatccaccacgatattaatgtcgtgttttttattcttatccaattcgatatcggcactaacgtccatgacttcactatcgacttgaacacggacatagccttctcgttggattttttcaaatacttttttatgttgcccttttttgccacgaataatcggtgacatcacctggagtttcgtcttctcaggtaacgctaagacacgatcaaccatctgttcaacggattgactactaatttcagtcccatcgttcggacagattggatgaccgacccgcgcccataaaagccggagataatcattaatttccgtgactgtcccgactgtcgaacgcggatttttagacgttgttttttggtcgatcgaaatcgcaggactgagcccatcaattgaatcaacatctggtttatccatctggcctaagaattggcgcgcataagccgataaactctcgacgtagcgccgttgtccttcggcatataatgtatcaaacgctaacgaactcttcccagagcccgacaatcccgtcacaaccaccagtttatcccgtggaattgtaacatcaatatcttttaaattatgcgctcttgcgccatgaatgacgatcttatcatttgccatgctttacctcttttaatcaatttcactcttaatctctaagatggtatcccgtaacgtagctgcctgttcgaagtccagtttcttggccgcattccgcatttgttcagataaccgttctaccatttctagtttttcagctttcgacatactatcgaaatcaatctcgttggtcatcttgacttcttcagggtgttcgactgattgaacaaccgaaatcgcatcccgaactggtttgataatcgtcttcggcgtcatgtgatgtgcttcgttgtaggcttcttgaatcgaacgccgccgcttggtttcatccattgcattgcgcatcgaatcggtaatcttatcggcatacaaaaggacttgcccgttttgattccgagaagcacggccgattgtttgaatcaatgagcgctcgctccgcaagaaaccttctttatcggcatccaaaatcgccactaacgagacttcagggacgtcaatcccttcccgcaacaagttaatcccaattaagacgtcaaacttaccaagccgtaaatcacggataatttccgttcgttccaaagtcttgatatcactatgcaagtaacggactttaatccccagttctttgagatagtcagttaaatcttccgccatcttcttggttaacgttgtaataaagacgcgttcgttcttttcaatccgatcattaatttcgccgaccaaatcatcaatctggcccataatcggccggacctcaatattcggatctaacaagccagttggtcgaataatctgatcgacctgaatatcggtttgttcagcttcataagggcctggagtcgcagaaacgtacatgatttcattgacgtgttcttcgaattcaggtagcgtcaaaggccgattatcaagcgcacttggtaatcggaacccataatcgattaacatttgcttccgggcacgatccccgttatacatcccgcgaatttgcggcatcgttacatgggattcatcaatcatcatgattgaatctttcgggaagaaatcgagcaacgtataaggtggttcccccgccgcacgatcctccatgtgccgtgaatagttttcgatccccgagcaatagcccatttcttgcatcatctcaagatcgtaattcgttcgttgttccaaacgttgggcttccaacaacttgccgtccgccttcaattccgttagtcggccttctaattcagccttgatactcttaatggctttttccatcttttcttcactagtcatgaaatgcgttgctgggaaaatcgcaacatgttcgcgttcaccaatgacttcaccggttagcgcgtcaacttcaacgattcgatcaatctcatcgccgaagaattcaacccgcaacgcatgatcatcacgtgaagccgggaaaatctcgaccacgtcaccacggacgcggaaacggccccgttggaaatcaatgtcgttccgttcaaattgaatatccaccaattgacgcaataagtcattgcgctcaatctccatccctggccgtaacgaaaggacgtgatcttgatattcattcggatcacctaagccgaaaatacatgaaaccgacgcaaccacaatcacatcgttgcgttccaacagcgcactggttgctgaatgccgtagtttgtcgatttcgtcgttaatactcgaatctttttcgatgtaggtatcacttgaaggcacataagcttctggttggtaataatcgtagtaactgacaaaatattctaccgcgttattcgggaaaaattgcttaaactcggcatagagctggcctgccaaagtcttattatgcgaaatgatcaatgttggtttgtttaaattcttgatgacgttcgacatcgtaaaggtcttcccggtcccagtcgcccccatcaagacttgtgcttttgcacccgcctcgaagttcttagttaacgtttcaattgccgctggttggtccccagctggttcatagggcgccactaaatcaaattggttatcattctgtcgttcaatcatcaaaagcctccattaccatttgctagcgataaaagaagacgccgggtagaagttgccctccaccataacgtctacttaccgattttataaagaataatattccttgtcctttaagtcattcactattctaccacaccgaacatactttcgccagagtgctgattaaagagtgcgtcattaagcggttatcctttgaggattagcctaaccagacggattagcgacgcagtcgatgatgcggctggtgtagctaaccggaaaaggatgcttaatgaaagcacgtttcaactaaagtgtggaaacgtgctgttgtcagtagattcctgcgctttgctacacttgtcaaatcgccgcttatagcgtcaattcgccaagttaggcaaatgctctgaatctgagcgactgacaacggcactctattccgctagcgtctgtctcactaattgggttagcttccctcgatctgcgaagtcttcactcagtaaatctggcaagatttcttggatgaaataacgggcgcatgcgagattttggtattgcataatcgtttttaaactttccgcaaaaatttctagaaaagcattctcaggattacctttttcaatttcaccaaaagactcgtagagtaaatcaatcttatcggcaacggctaataattgcccttccaaagtttcatcttttccttcactcaaacgacgttgataccgttcttgtaagaaatctggaatttcatttttaatgaagttagcggttaatgaactttcgacattggccaacatcgtccgcaattcatgcgttgcgtatttgaccggcgttttaatatcaccgataaaccgttccgtataatcgtggttcagtgcgcgttcgtacagcacttgccaattaatcgtttgcccattttcttcttcaatatcgcctaataattgcgcaatttctgctactttaaaggagtgcgctgcaacggaatgttcttgatatttaaacaatcctggtgcgcgatttagtgtctccaaattattcaaaccttgcaaatattgatgcatacccataccaaactacctcccttttcttacaaaaatagaccgactaacgcagtagtccgtctatttgctgttctttattataggtaagttatcctgaaatgtaaaacagaagccctatctattttacaagttcatgaattgctttttcgaagtttgctaacttcaaatcagctgttgcggcatcatcagcggatgtccccacatagaatttcacttttggttcagtcccacttgggcgaatcgcaatccaagtgccatcttctaagtgatatttcagaacattagatgttggtaaattgatgggttcagtatgaccgtccgcaaaagtttctgtttgtgtttggaagtcttctgctgaagcgactttgatgccggcaaattcaactgggctttcttcacgacatttaaccatcaagtcagccatttgttgtgggccattgaccccttcgaaatcaactgcagtcgtttgttcagcgaagtagccgtattccgcatataattcttgaatgccatcatacaaagtcttaccgtttgacttgtaataagctgcaacttccgctaataagaccaatgtttgaatcgcatctttatcgcgaacgaatggtttcactaagtagccatagctttcttcgaaaccaaacatgaaggtgttttcgtctgtgtcttcaaagtgttgaatttgttcagcgataaatttgaagccggttaagacatcaatcatcttcacattgtagctcgctgcaatcttcgttgccaattctgttgacacgattgacttaacagccgctgcattggctggtaatgtgccagcatctttactagcttgtaaaatataacgtaataaaacagaagcgatttggttcccagtcatcaattggtaactcccgtctggttgacgcacagcggcgcccaaacggtcagcatctggatcagtcgcaatcaacaagtcagcttgttgtgctttcccgagctcaatcgccatatcgaatgtttgtgggaattctggattagggaatggtgtcgttgcaaattctggatcagcaactgcttgttcagcgaccattgtaaattgttcaaagcctgcttgacgcaatgcgcgttcaccaagtactttcccggtcccatgaagtggggtgtaaatcaatgacatggtcttgccgactgtgtcgaccaattcttgattaatcgtgacttgcttaacttcagctaagtaagcttgatccacattttcgccaatcaaagtcattaagccggcttcgcgcaatgtgctttcatcagccacttcaatcgcaaataaatcggttactttgcgaatataacttgtgattaaatcggattccttaggtggcatttgcgcgccgtcttcgccataaatcttgtaaccattgtattgtttaggattatgacttgctgtaatcatgataccggcataggtatgtaagtgccgtacggtaaatgataattcaggtgttgggcgtaaggcatcaaaaacaaacgttgggatttgatgttgacctaagacccgcgctgcttcgtgcgcaaatgtttcagattgataacgtgaatcaaaactgatagccacaccgcgttttttagtcgcttctggtaatgtttccatgaattgagcgaggccttctgtggcttgacgcaccgtataaatattcatgcagttgatcccagggcctaaaataccacgcatcccagctgtcccaaattccattggaacgctaaatgctttttctaatgcatcatggtcgtttgccatttcgttaagtgctttttttaaaggtaaatccatttctgtttgattattccaaattgcataattatcttgccagctcattgtgtaacccccgcattttagtctaaaagctagttctaagtataccataatcaaccgctttcctaaagcatcggttgtacggtaatgcgcaccaagctaattgtctgggtcgattatttaataatgcttgtccttctaaaaattaaaatttttcccaaaataaaaaaacggccgactaaaatttagtcgaccgctggaaatgtgcgtcataagccacatttttaggttaatcctcaaaaataaaatcgtttcgaacgcactctaatcgtgcttcctcgaactgtcttttctggttaaccctgaatgtcaaacgattgctaccgcaatccttcgccattctgtgttaatcctcggaagctaaccggctgccgtcgcactctagatactttgtaagtatttaaatacttcttggcctgctatgccgccgtcgccaactgctgttgtaatttgacgaagatctttttcacgaacgtcaccaattgcgtagatacctggaacactggttgccatgtggtcatccgttttaatccaaccggcatccgttagaatccctagatcaccaaaggcactagtcattggttcaatccctacatagatgaagaccccacttgcagcaacttctttggtttcaccagttaccttatcaatgtaagtgacaccggttaccttcttgtcgtcaccttcaatagttgtcacttgtgcattccagatgaagtccatcttgtcgttagcaaatgcacgatcttgtaaaatcttttgagcgcgtagttcatcacgacgatgaatgactgtcaccttgctggctaattgcgtcaagtagaggccttcttcaatcgctgaatcgcccccaccaatgaccacgacttctttattcttaaagaaggcaccatcacagaccgcacagtatgagacaccacgaccgccgaattcatcttcaccggggatcccaatcttcttgtgttctgaacccgttgcaatgatgattgaacgcgcttcgaaatcgccttcgtcagtgtgcacaatcttcatctcgccttgcagttcaatcgagttgaccgtaccatagccgtattcagcaccaaattgagtggcgctggcatacatcttttcgcctagttcaggaccaaggattgatttaaagccgggataattttcgacctctgctgtattattcatttggcccccgtaaattccgcggtccaacatcaatacagataaattcgcacgtgaggcgtataaagcagcggtcatcccaccaggtcctgcgccaatcacaattacatcataacttttagccatgtctattatccccttacttttaaaaagtgctcgttcttcatagaatgtatcttacccgttatgtaaaaaaaagtctaccaaactgttttaccagtttgatggacttgttggtttcaattcttgtaataattcagtggcttcggcatcgaaatccgaatcgtcactctgtaaataagcagtcgctaattcatagctagcctgcgtctgatttaaaaaggcatacgccgttgctaaaaaatattgtaactcaggatgactctgatagttggcggttggaatttcttccagaacggtcgccgcaccatgatagtcgccaaccgattccaaacaaatcgctaattggcacaccacaaagatgtaatcatctttggtcttagccagcgactttgcccgttgtaaacacgttaatgcgcgcgtgtactgaaatcgttcaaacgcctgcatccctctgtcaaaataaaactcacaagttggtcttacagataccaaatcgcccataaagtaatcggttctcctttagcctttttctcaacgctaatcatcataacacactctgatgatgggtgcgatacccattcaaaatgatgccgctttattcgttaaaaagttttagacttcatcaaaatcgatttcaggtttacctgaacgccgcattaaatacgcaatttcagtcttaatatcacaatcttcatacaatacattatagatggcccgtgtgattggcatatcaacagaacgttgttgagccaattcataggctgctttacatgttgcgaccccttcgacgaccatccccatattggctagcacatcagctaatttttgacctttaccaagtgcatttcccgcacgccagtttctcgagtgaacactggtcccagtcacgattaaatccccaacaccggataatccgataaaggttaatgggttagcccccatggcaacgcctaagcgggaaatttcagctaagccacgcgtcatcaaggcggccttcgtattatctccataaccaagcccgtttaaagcgcccgcgccaagtgcaatgacgtttttcaaagcagctcccatctcaacaccaaccacatcagggttggtatataagcggaaataatcattcatgaaaatctcttggatccattgggcttgaatcaagtcacttgatgcggcagttaaggtagtaatatctttttgtgcgacatcttcagcatgactaggacccgataaaacaacaatcccattgcggttggtttctggaatggcttctgtcaagacttctgaaatccgtttgtgcgtgccttgttcaagcccttttgaagccgtcacaatcacgggtttcacttttttcgcaatcatcacaggaacaatctgttccgccaccgcacgaatcgcttgtgttggaattacaaacaagacaacgtcaacttggtcaagtgcaacgttaagatcaatcgttgcgtgtaactggggatcaattttaaaatctggtaaataatgtgtattggtatgctgttcatttatttcagcgacttttttaggatcattgccccacaactcaacttggtggccattttccactaataagtttgctaagatggtcccccatgaaccggcccctaaaactgcaatttttactgtcatctgataattctccttttaaacaaatccctatttctgttcttttgcttgattgccggttaaataatccggtaactgactgtgcttacgccgccaaatccaaagaccaattgcaccaaagaataagacgagtgagacaatctgcgatacccgcaatggaccgatgaataaactatcagtccgcatgccttcaatgaagaaccggccaaacgaataccaaattaaatagctaaataagatttcgccttgtttaaaccaaccagttcgatggcgaatgctcatgatgataataaaccctaatacattccatgctgattcatataagaatgtcggctgacgatacgcaccatcaattaacatctgttggatcacccaatcaggtaagtgtaacgattggagaaagtgcaatgttgttggcgccccataggcttcttggttcataaagttgccccaacgtccaattgcttgtgcgatcatcacggttggtgccgcaatatccaacactaaccaaggcgatagtgcatgacgccgacaatagataatgaacacaatggcagctgcaatcagtccaccgtaaatcgcgatcccgccgtgccaaatctgaataatttcgccgggattggcttggtaatacgaccattcaaaaacgacgtaatacagtcgggccccaattaaggcaaatggtaatgcccataaaattaaatttaaaatatcatcttcactgacattgcgccgtttagcttcctgtaatgccaatccaacggctaaaacgaccccagttgcgataatcacaccataccagtggatctccaatgcgcccaatcgtaatgcaatcggatttaatgcgcctaatagtagattcaaattattcgctccttttgtaaatgtgctttcatcaaaacgtacttttcaagctaaatttctgcgcttagcgtcgtgaagcaaacaatcgactgcgtcgcttatcgcttcactgtgctaatgcgcaaaagttggacaagcttgaatgcactcttatccaaaacgtgttccgtaagccatatccttccggttccccctgaatgtcaaacgattgctgacgcaatccttcgccattctgtgttaatcctcaggatatacccggcttactgcgcactctaaaaaaagactagtttgcatactgtctttctaacagtatagctcaaactagtcattagacctaccatatttaacgaacttttctgacttttaactattcttcttcatctgaattggcttcaattaacttgcctagattggcttcgaaggtcttcgttgcatcatagcccattgattttgcccggaagttcattgccgccacttcaataatgatggctaagttccgcccgactttaacaggcacggtaatcttcggtacagggacgtcgaaaatcatttgttcttcggtatctgaccctaagcgatcatatttcttatcctgtgaccaattttgcaagtggacaattaacgaaattgacgtttcagcccgcaccgcaccagcaccaaagaggttcatcacatcgataatcccgatgcctcgaatttcaagtaagtgacgcaaaattgcaggtgcttcaccgaccacggtttgttcatcttgttgataaacgtcgacccgatcatcagcaattaaccgatgacctcgtttgactaattccaatgccgtttcgctcttcccaacacctgaatcgccagtaattaaaacacctaaaccgtaaatatcgactaacacaccatgcattgagcgccgttcagctagctttccttccaaataatcggttactaaactcgacaaacgcgttgtcgataaattcgaccccaacacaggaattcccgcttcttcagctgctttaagcatttccattggtggttctaattggcgcgagaccaagaaacagggcgtatcttcagaagccatccgacgcataatcattaaccgttcttctggtgtcatattttgcgtaaatgaaacttccgtccgtccaaataattgcacccgctcgtaagggtagtaattaaagtagcccgttaattcgagtcctggacgggaaatatcactcaccgtcactgctttattttttaaatgtgcttcaccggcataaacttgtaattttaaatcggtgattagtttttgaattgaaacactatcagccatgagttacccgtccttcattttcacttatatcctctatcatattgcttttaaggtgatttttcaactttaatgtaggcgttttcttatctaaacaaaaaaaacgggaccaatgtcaatcttaattgacgtcagtcccgctaactttttaataacgctctctcacaaattgatttgtaataatcgtattggcaattgataagatgattgccacgatcacggctgctccaaaacttgtgaagctaaagtgggcgccgacgaaaacagcggtcaattctaacataatcccgttgatcacgacactaaacaagccgaacgttaaaaacgtaattggaaatgagagtaagctcaacaatggtttaataaagatgtttaaaatcgataacacaatgctggcgactaacgcgatccaaatgttttcaacatagaataaattgggcaataagccagaaatcgcaatgaataacaaagtatcaacaattacgcgtgtccaataccgcattagaaatcactccagtcatcatcgtctactttgacatcacgagcttccttgcgttgacggctaccttgatgtgctgtttcttgataagaatagtcttggtagtcatggcgccagtctgcatgccgtggacgtctacttgggccagcaattgcccggtagatgaagctgacaattaacccaatcacaatcagtggtagcgcaaattttaataataacagtagcgagccaatcacgagactaaacacgccaactgccgccataatggcgataatgactaataaaatcattaaaaaaggcattaaaactcactccattcactttcagaatcatgtttactctgacgtggccgttctggaatcaccatcgctaagatgatgtagaccacaatcccagggaacgctgctgaaaacattgagaatacaacatatagaattcgaactaatgtcgcatcaatattaaaatactcagcaatcccgcccatcacaccagaaatcattttgttatctcttgatttataaagtcttttccccattgttaaaacccaccattccttaattttttagttatcgttgtctttcaataaaatattaccagttgtcgtgcttaatgttaaacgagctgcctgttcattgtcgttacggccaagttgtaacatttgattccccgtactttgccgttgttcgatggtttgggtgtttgcaagccgatttttaatcatcccaaaacgcgtgcgggcatcaacagtcattgccaaagtttgtggtaaagctgtcttgattgtgccattcacagattttgcttttagatgttgtaaatcagttgtcgtcaaagtgttcttgatatccccgttgaccgttgaaacactcgcatttaaaacttgcgcttgaatcaataggttcccgttgaccgttgttgcgagtaaatcatcgtaacgaccttgatcaaaggtaatgccaccgttgacgttttcagcttccaccattgcagcgttggtgctgattaacgttaattcaccgttagtcgtcttcaagtaaatatcccggccggtaaagccatctaattcaacatccccgttcaataacttcacattcgtttgtaagtagttattggctggtaagtagaacgttaagtccgcttgaatccgtttattcggcacttggaagaccaagtcggcatcagtcacatcaattgtactgcgcgcttcaaaagcagccaatggtgttgcttctgccattttaccatataacttcacttgcgctgcgactttgacttctggacgatcccagatttggaaatgtacactaccgttagccactttgacgttaatcatttctggtgttacgtcagaataaacgaattcatggctgaacttttcagttgccaaaccaggcaccttaaagttcacttctttccaatccacattatccatgactgttttggcagtattcttcacgaacttaccaaagtgtgtgctagcttcgcctaacttatcgctcaattcatcaaatgtttcactggcattttctttccagtcatctgataagcctaatttttctgaccattgatttttggtcatttggcggcgttctttttcgatttggttgagttcatccgtcaatgcttcgcgtttggcttccaactcgtcgacttcagcttgcttttgtaataagccagccttgagtgtttgccgttcggttgctttttcactgcttaaactatctaaatcttccatcgtatcaaggacagtgacttgttcttgatcagcgtgcattgcttgcttcaaatcttgcaactgccggttaacgccggaaaggttaacggttaattcgtgtgccttttcttcaattgcgcttttatcagcggttggttgttcagtttgctccgttgctgtttcagttggatttgattttacatcttggtcatttttggctaaattttctaataagactaatgcttcttctgaagttaaaataccttggttcactaagtctaaaattcgttgacgttcattcattgttttgacctccattgatcattcgttgtactgtttcacttgactatgactctattatgccgattttacagtcgattgtcataggtccaaaggttgatttttatttaggtatcaagagtgagaacaaaaaaagcgcaggacaaaattatttttgtcctgcgcttttttgcttaaacgatttgtcctgggtaaggttcgccggcgacaaattggaaatcaaaggttgctaattcatccacactggttagacattgggtaatccctttagccaacattaggttgatgggattggcttgtaaatcatcttcacaaacaaagacgattggtttatgacaggcattcaagtagccgacttcaaacgccgttccagtatcttcgtcttgcatatcccataacacaactgccatgtctgctaaatccattgctgtgatgtcgttttgatacgtttggttggcccattcgtaccccccgaacatgccttctggatcatgatcttctgtcacacccttgtattgatgttcctgtggactatgaatataaccaatcgttgggttttgttttaaagccgcgtgtgcgcgttccactaatgaggcctgtttaggtgtaaaccaaccgccagctaagtatatttgtttttgcattatgattctcccactaaaaaagcgacgagcaagtcgaccttgtcatcgctttttaaaatttttaattgaattgtttagaattcatcttcttgtgcattggagtttaattccactaccttaccggttctgaggtagacaatccattcacagatgtttgtcacgtaatcgccaatccgttcgaggtagcttgcaactaacatgtagtccatgctcccaacgacggtttctgaatcacgttgcatttctttgatacagtcgtcataaatattgtctgaataagcattgattgcaacatcttcatcggcaattttgatggccttcttacgatcttctttgacgtaagcgtccaatacctcttcaaccatttgtttaactttgtctgccatatccgcaatatctttttcgatatcagggacacgggtattacccttgacccgaatcgttgatttcgcgattgaaacggcgtggtcacccatccgttctaaatctgaactagccttcatgattgtgacaatcacgcgaaggtcagttgagaccggttgttgaagtgcgattaactcaaaactcttacgttccaaatccgtttcccgttcattaatcttatgatcgtcagcaatcacctcgcgtgcgagttgcttatcgtgattaatgaaggctttaacagatttatagatggcttcgttgaccatcatccccatttcggagaagcgaacgtgtaaatcatttaactcatcttcaaaaagtcgtctcattgtggtttcccttctttcttagccaaaacggccactgatgtaatcttccgtttctttttcggttgggtttaagaaaatcttcttcgttggtgcgtattcaatcaattcaccttgtaaaaagaatgctgtcttatccgaaatacgagaagcctgatgcatattatgcgtcaccattataatggtatactgttggcgcaattctagcaacatattttcaattttagcactcgaaatagggtctagcgcagaagtcggttcatccattaagatcactttcggtttcacagctaacacccgagcgatacaaacccgctgttgttgaccaccagaaagtgataaagcactttcgtgtaacttatctttgacgtcgtcccaaacggccgcttgtttcaaactactttcaacggcttcatctaagacgcgatgatctttaacaccggataaacgtaagccgtaaacaacattgtcatagattgaaaatgggaatgggttcggttgttggaacaccatgccaacttctttccgtaacttaacggtatccatctcaggcgcataaatatcttggccattcaataagaatttaccggtcaccttcgccgagtcgattaaatcattcattcgattcaagcagcgcaagtaggttgatttcccacaaccagatggcccgatgagcgccgtaatttcattttcaacaaaatccatattaatcccttttaaggcctcattcttaccatagaatagatgcacatctgaggattcaataatcttatttgccacggggcaaacctccttgcgtcctagccaaagtgaccagaaacataatcttcggccgctttaatcttcggccgggtaaacattttacgtgtttcgtcgaattcaagtgcgtgccctgaatggaaaaaggccgtgtaatcactgattcgtgctgcttgttgcatgttatgcgtcacaatgatgattgtaaattcttcttttaagcgaatcaatgtttcttcaaccgtgttcgttgaaattggatcaagagctgaagccggttcgtccaataataaaatatcgggtttcatcgcaattgcccgggcaatacataaccgttgttgttgcccaccagatagtgccaatgcgctctttcctaatgaatctttgacttgatcccacaaagcagcttgttttagtgacgtttcaaccacttcatccagatactttttgtctttttgtccatgttgtttcaaggcaaaagtgatgttgtcatagattgatttggcaaatggattaggccgttggaacaccatgccgatatgttcccgcatcttatacacatcaacgtcatcgctattgatgttcaagccccggtacataatcttaccggtcacacgtgtattagcaatattgtcattcatccggtttaaactccgaagataggttgactttcctgaaccagaagcgccgattaacgcggtaattcgatagcgttcaaattgcaatgatgcatcgtgcatcgcgcgtttgtcgccgtaatagacgtttaaatcttcagttgataaggcaatttcatgttttggttcatctaaatgtttgatgtgcgtttttgttaaatcgtaatctgccattattttctcctatgctgctgtcattttacggtagacacgcttgccgatgacccgtgctaaccagttaaatagtaaaacggcgatgattaagacggcagatgcgccagcagaaaccgcagtcgcatccggcataatcccttccgagttaatcttccaaatgtgcaccgctaatgtttccgcaggtcgcaatggattcaacggactcgcgatgtacattgggttccagttggtaaaatcaagtgatggggcactttgtccagctgtataaatcaaggcagccgcttcaccaaagacccggccggcgcctaaaatcatcccggtaataatgttgggtaacgcttctggaatcacgacatgcttaaccgtttcataacgcgataaaccaagtgcaagacctgcttcacgttgtgtgaagtgaattgattttaaagcatcttccacattccgcgttaacaacggtaaattgaaaacggtcaaggctaaagcacccgctaagattgaaaagcctagcttaaactggataacaaagaccaagaaaccgaataacccgaccacgacggatggtaaggaacttaacacttcaatcgcggtccgaacaacattcgtcacccagttcttcggcgcatattctgcgagatagatgccggcaccaattgataacggtactgaaatcaccatcgccaaaattaatagatagaatgaattaaacagttggacgccaatcccgccacctttagtaaaggtttgcgcaggtttcgttaaaaactgccacgtcacgtgtggtaatccgcgcaccaagatatagccgagcaaacttgctaataataatacgatcaaaccagcgatgagggttagcacaccggtggcaactttatcccatttttttgcatccattagcgacctattgctcccttccgaccaattaaacgaactaataagttaaatagtagtgacatcaataataagagtaacgccaatgaccaaagtgcattattggctaatgaacccatgaccgtattcccaatgcccatcgttaacacactcgttaacgttgaggctggggtaattaagttatgtggtaataacgcagcgttcccgatgaccatttggacggccaatgcttcaccaaacgcccgggccatcccgaaaacaaccccggttaaaatccctggtgtggctgcttttaaaacgactttccatgttgtttgccaacgcgttgcacctaaggcgagtgaggcttcgcgataatgccgtggcacactcttgagtgcatcgactgtcatcgatgtcacagttggtagaatcatgacgaacaaaacacaagtcccggcaagaatcccaaagccactgccaccaaacaaatgacggacagctggtacaatcacggataatccgataaacccgtaaacaactgatggaatcccaacgagcaattccatcactggttgcaataatttttcaccccgcttaggtgagatttcagtcataaaaatcccagcgccaattgcaaacggtgttgctaataaagccgctaagaaagtcactccaaatgaccccataatcattggtaaggcgcccacttctggtcgaccatgactatctttcaaacttggattccaattagactgcgttaaaaagcggcctagattgattttatctttaaagaaggtcgctaacccttttgaagcgacgaagtagaaaatggcgagcacgatgaacacgattaaactaatacagaataaactgattaatttgccccgtgtttcacttttggctgcgcgtgatttcttaagtaaacttgctttaattggatccataattggccccctacttaacctttgtaattgtgccatcaaccgaccgttcaaccgtcatcttagcaactggaatatagcccatcttgccgacttgtttatgttgaacctcatctgataagacatacgccaagaaacgttttgttaacccagttggttgccccttggtgtaaacatgttcatatgaccagattggccatgcattagtcatcacgttttcatcggttggtgcaatgccgtttaatttaaccattgcaatcgaatcatctacgtatgaaaaagcaagataactgatggcccctggcgtgttcgctacaattgatcgcaccatccccgttgaatcttgttcttgagcgggtttagtcttgcgcgacttcatcacccattgttcaaacgtcgtccgcgtcccactaccttgggctcggtttactaaaacaaccggctgatctggtccaccaacgtcttgccagttatcaatttcgccactaaaaatcttcgcgagttgcgtcaatgttaagtttttaatccctaattgcttattaatgactggggtaatgccgacaacagccacgcgatgatcgaccagcttgtccgctttaatgccagccttttcttcagcaaataaatcagaattccccatctgtacagcgccagattgaatctgactcaagccagtcccagaaccgcccccctggacgttaatgaactgaccgctgtgatcagcactgtattgttcagctaacgcttcaatcagcggctgaagggctgatgagccgaccgccgttacggactgaccattttgtttagactggcaaccagccaatagtaataaactgaatgtgactaataagccaataacattacgtttgcgcatgttaatcctccacgaattccatttaaacctcgtaagttccattataaaaaaggtttgtaaaaactaagcctatcaaatgtaaattttgtgtaaatcaagcgtttggtagcttcaaaatgaattcactaccgacacctaattgactctttacggtcaactgcccctctaaactggcggtaatctcgctagcaattgctagtccaaggccggtcccgctcttatgggtcgcgcgcgcttgatcaacccgatagaatcgttcaaaaattctttcttgtaggtcacttggaatgcccaaaccggtatcgacaacgcggataacaatttgatctttttcaagttgcacggcaatcaccaacgagccgttttgtttattatacgtgatggcgttagcgattaggtttttcaagatttgattaaacttcattttctgaattctaatcgctaaatccgttggaatatcaacggagacgtgtaactgcttttgttgtgccttttgttgcatcagttcgagattagcctgcaccaattcacgtacattcacaagttgctcttgcgattggtccttacgatctagatgcgaaagcgctaaaatatcttgaatcagcgcagttaatcgcgtactttcgtcatagatgatttgtaagaattgcttttgcgtggcaggatcttccgccgcaccagctaacaacgtctcagcaaagcctgtaatagccgtcaccggcgtcttcaattcatgactcacattgctgacaaaatccaactgcatctgctcaacgcgccggacatcggttaaatcatataaaatgactaatgcttggaatttcgatttaaccgtattgagttggacaacattcgcatccacaaaccgttcttgattttgaatcaactgaatttcttggtgatgactctttcggtacctaaaagtgtgctcaatcatccgtgttaattcatacgtcttgatatcatcaatataggggtgtttctcagtaacaatcgtcgtctccaataaccgatccattgcttcattgtgcaaaacgacttcacgattttcgttaatcaccatgacgccgaccggtaaatggtcaattaggcggtcaaaactgccctgttgcatggcaatcttctgccgcatatgccgcatatcaccatttaatttattaatttcttgcgcgaggatatataatgacgcatctttttgaaaaataatcggttcgggcacttcttcatgccgaatatgatgaatattagcgactaaaattttcaagtggtcaaagaaatgacggcgttgccgccagaaacggtatagaaaaatccagctaccgattaaatagacaatcgtgaccgataaagcaatcttcggccacgtatgccagaactgttgctgaggcactactaagacaaagttgggccgatctgcttggtgtgcgtaaaacaaatacggttgcttattaactgtttgccgcgtactaaaattggcggcagaatgattccgattgacaatatccgtcactgctttttgcaactttgttttattcggcgattttggcgtcaaaacttgtaagccgttttggcgtaaccacttttgccgatcaaactgtggttgtttgatgattagcgcatagtcggcgccccgttcctttaacatcgcgtcttgttgttgggcaatcaccaaattgacaagcacaataaaacctatgtaaacagccactaaaatagtggctagctgataaaatctaaattgatcatgtttggtcatggttggggtcctccaattgataaccgaaaccacgcaccgtttttaagtaaactggatgacgcggatctgtttcgattttttcccgtaaatgactgacttgaatatcaaccattcgcgtttcggctggataatcaaagccccacaccgcatttaagagtttctcacggctttgaaccttgttaatccgatgcataaagtaaacaaggagttcgaactccttaggcgttaaatggagcttctgagtgccctttttagccacaacttcgccttcatcgaccattaagtcccctacttgtaaaatatcactagggtgcgtttcaacgactgctacaggctgtgccgtccgccgttcaattgcccgaatccgcgcgataatttcgcgtggactaaatggtttagtgacatagtcgtctccccccacttcgaggccgacaattttatcggtttcgctatccttagccgttagaatcataatcggcgtttttaactttgcctcccgaatcttcttggtaacggtaattccgtctagcttaggcaacattaaatctaaaataataaaatcaaacgactgctgtaaagccatcgtcagcgcttgtgcaccgtcagttgccgtcatcactttaaaatgttcttgttccaggttatagcgtaataatgtcaagattgctggttcatcgtctaccactaaaattgtcttcattcatgccaccctttatttacttaattctctgggaataatacaacgcctaactcatgtggtgcatcagcaaaaattgcgccttcagccatccggaactcaccgtttaaatcttgaacctttaaatggcaatacgttggctgactttgaatcgcccgataaaaattatcgttatttgagacagcctcgccattacattcaacaattgtatcgccaacgaccaaccccattttagcagccggcgtttcgcgtaaaatccctaagataaagacgccatcgtagggtttcgtaaagtgcaactgccgttcatgggcactgcgtctactcaaccgccattgtaatgcacagcttagtactagcgcaactgttaacatgccaataatccagttcggaaatgcaacggcaattaacccaaacccaactaacaacaagccaaagatcaaatagctattggcatttttagtaacaactgatttcattaagcctttgactgctttcaaactaaatcccaataacaatggcaagattaccaagctatatgattgatgcccgatatttaagaccggccaaaaacccaaacttggcatatcaattgcccctggcactaagaaaaagaccggcgcaatataaatttgtcgactcataaagaaggccgtcaaccgccctcgcttgctagtcatcacacgcggtgtcacagttgcctcggcatcccaacgttgtaaaacactattgatgacggtcactaacccaataatcaccaataattcagccaaaagacttgcttgaccttccatctgatattggggccatatgaatgttgcaccagcgtagaccaaagcactgattaaaaaggttgccgatacgttttgccatctagcagccactagcaaactcaaaatagcgattagttgatagaccagccaccattgcatattaaccatcgcccctaacactaaggtacagcaacttaaggctagccctgcgagtagcccatggcccacaaaatggcccacttctatccatcgtggattaatcgcaattctaaaggtcttccgttccaagctaattcgtctatgcgctaaccagccagcatacacaatcgctaaccataaaagtggtaccgttagtaatggtcgcaaaatatcaatgatcatcgtcaattcaacaaacccccagcgtctatatttaaataccgtgcgtgtttccaacgacacacgctcgatttccagctgccgaatttcgcagttatcccaatcagtatagcattttgcccccttaactgcctagggttcaaaaaaaaagagtgacgaacaatttaatgttcgccactctttcactaatttagtttaaattttaaggaaacgacgcattgagatgacagaacctaatgccccaatcacaatcccaatcacagccattgttaaatcaagttggaataagaaaattcctggtttcaacattgaataaccggctgaagccatgctgagtgccatatgacggtaaacccaaccataacctaagtcgattacaataatgggaataattaccccaagtaatccaacccaagccccttcaaaaaggaatggccagcgaatatacgcgttagttgccccaactaaacgcataattccgatttcgtcgcgccgcgataaaatcgtaatccgaattgtattggaaatcaagaacactgccacaaagagcaataataaagtaaaaccaacgccccatttacggacgctactcattaccttgaacaacttcttagcgttgttcccaccataagtggcatcataaacgtatttcaattttttcgcttgtttagcgactttaatcgtttgacttggttttgtcgtacttactgtgtaaacatcgtacaacggattatcgtctccggtaaacatcttaaatgattgaccgtaactgccgacaaccttgtttaattcctttttacgacttgaatacgtcacttctttaacagacgccattttttcaagtttcttttgtagctgatctttttgtttacttgttgtgccccgttcaatcataacccgcacgtgcacatcattttcaatatcttgtgaaatcttgttaaagttgaagatcatcgcaaagaaaatcccgactaataacaacgttacggtaactgcactaacagctgcgattgacatccagccatttcgttttaaactcttaaaactatcgttgagatgacgcttcaatgttctaatcttcatagccgtagtcaccttctttttcatcacgaactaagcgaccgtcttcaatcgctaagacacgatgggtccgttcgttcaccatttgtttgttatgggttgccattaagacaatcgtcccacgttcattaattgcttctaaaatatccataataccatctgacgtttcaggatctagattccccgttggttcatcggcaatcaacacatctggccggttcacaatcgcacgtgcaaccgcgacccgttgttgttccccaccagaaagttcatttggaaagcgacgaatttcacccttcaagccaactagttcgagcacttctaatacacgatctttgattgcttgaggttctgcctcgatcacttccatggcgtatgccacgttttcaaacaccgttaaacgtggtaataacttgaaatcttggaaaacaacacccatcttacggcgtaagtatgggacatcgtgatccttcataccgattaaatcaaaaccagcgacttcgatttcaccactcgttgcttttaattgatggtacaacatcttaatgaatgttgatttaccagcaccactgggaccaacaatataagcaaattcgcagggttcaatcgttagcgaaagatccttaattgctgtcacgccatttggatacttttttgacacatttgtcattcgaatcaattggggacactcctttttttgtcgttatcattatttattgtcaatgaaaaccgcaatcttttatattatagcatgctatttattcaaataatcacaatttgattacatttatatttcaatttctttgcagctagtcgggattcttctgactcaactgccattgcagataggcatacataaatggatccaaatcgccatccatgactgcttgcccgtttccggtttcgtagtcggtccggtggtctttaaccatcgtgtacggatggaatacgtatgagcgaatctgtgagccccagccaatttcaagctgttcgcccttaatagcagccgcttttttcgcctgttcttcttgttctttttgatacaatttagccttcaacatattcatcgcagtttcgcggttttgcaattgcgaccgttgcgcctgtgatgaaacaacaatcccagttggtaaatgcgttaaccgcacggctgatgatgttttattgatatgttgcccaccagccccgcttgaacggaagacgtcaattcgtaagtcttcggtgcggacttcgatatcaatcgaatcatccaattccggcatcacatcgactgaacaaaacgaggtgtggcggcgcccagctgaatcaaacggtgaaattcgtacaagccgatggacccctttttcagaacgtaacatgccatacgcgttgtgccctttaatcatcaaggtcacactcttaatcccagcttcttcaccggcctggtaatcttctgtttcaacggtaaagccgtgtgcatctgcccagcgtaagtacatccgcaaaagcattgaaccccaatcctgagattccgtaccaccagcaccaggatgcaattcaacaatcgcgttattgctatcgtagtcgcccgatagtaattgtccgagttcatattgttgcatctgagcttgaacagccgtcaaatcagcttcaaaactcgtctggagttcagcatcgggttcttcttgtaatagctctaatgtcacttgtagctcttctgattgcgcttgaagttgcataaaagagtcgtatttttcctttatggcgttattttgatcaattaactgttgggctgctttttgatccgaccagaaatcgggatccgccatttgcgcttcattttgcgcgatgctttcttgcaggccatctaagtcaaagtgaccccctaaattgcgttattttagcttcaattgcttctaaaagatgttttgcttcacttaattccatattttagtccctccactattttttcccattaaaaaatggctaagttaactacctcagccattttctacgcgttagcgtcgaatattttgacggatttccgccttcatgaagagccgggttgtatcgtaatcgatgtcgctgatcatttcttcaaacatccggtaaccttcttcttgatattcaaccaatggattcatttgaccgtagccccgtaatccgattgagttgcgtaattgatccattgcatcgatatgatcggtccagcgttcatctaccacacggaggataacgactttttcgaattcgagcatttgatctgcatctgctaattgtttttgttttgttgcgtaattcttttctgcaaaggtcatcaataatgattcgatttcttcagcagtcttaccttgtaatttttcaattggtaattcttcttcactgaccattgaagctgtggcaaatgcgtggattgcttctaattcccagctccccatttcaccttgtgtatgcaattgcacaatccgtttaacggttcttgaaatcattggcatgataacttctttcaaattatcttctgccatgatgacctgcatccgttgtttatagatgacttcacgttgttcacgcatcacatcatcgtattgaagggtttgtttacgtgtatcgtagttattcccttcaacccgtttttgtgcggcttcaacttgacgcgtaatcatcttactttggatcaccgcatcgtcatctgaaatcttcattcggtctaggaaggctttaatccgttctgaaccgaaacgtttcatcaagtcatcttccaatgacatgtagaattgtgtgacaccaggatctccttgacgaccagcacggcctcgaagttggttatcaatccggcgtgattcatgacgttcagtcccaataacagccaaaccgcctaaatccgtcacaccaggtcctaatttaatatcagtcccacgaccagccatattagtagcgatagtgaccgcaccacgttgaccagcattcatgataatttcagcttctttaaagtgattcttagcattcaaaacagcgtgtggcacgttattttcatctagtaatcgcgatagtaattctgaagattcaaccgcaacggtcccaaccaatactggttggcccttagtataacgttccttgatatcttcaataaccgccttaaatttactttccaaagttggataaagcacatctggtttatcgattcgggcaattgggcggttagttggaattgagataacttccatgttgtaaatttcgcggaattcttcttcttcggtcttcgccgtcccagtcatccctgataacttgttgtacattctaaaataattttggtatgtgatattcgccattgttttggtttcatcttggatttcaacgccttctttggcttcaatcgcttgatgtaatccatctgaataacgacgaccatccatcacacgacctgtaaattggtcaacaattaggacttcgccttcttgaaccacataatcaatgtcttttaacatgatatagttggcccgtaatgattcgtccaaatgatgcgtcaaggctgtattttcagtgtcatataaattgtccaagccgaagttagcctcagctttttcaatccctgattctgttagactgatggtctttgttggccaatcaatcttatagtcagtttcttcttttagagttttaacaaaacgatcagcacggatataaagtgctgttgacttttcagcttgaccagaaataatcaatggtgtccgcgcttcatcaattaaaattgaatccacttcatcgacaatggcaaagttcaatggtcgttgaaccatttcttctttgtaaaccaccatgttatcgcgcaagtaatcaaacccaagttcactattcgttgaataagtgatatctgagttgtatgcgtcgcgtttttcttctggtgtcttagcatttaagtttaacccaacagaaagaccgagccagttatataattcacccatttccgttgcatcacgacttgaaaggtattcgttgacggtaacaacgtgaacgcctttaccagccaatgcatttaaataaacaggcatggtagccgttaaggttttcccttcaccagttttcatttcagcgatgttaccttcgtgtagcgtaatcccaccaataatttgtactcggaacgggaataaccctaaaacacgtttagcaccttcacgcgcaaccgcaaaagcttctggtaaaatatcgtctaatgtttcaccatttgctaatcttgttttgaattctggggtcttagcttgcaacgcttcatcagataaattactatattcatcttcatagctttgaacttgatcggcaattttgcccattcgcgctacttcacgtttatcgctttctacccatgtttttagaaagtttgccatgtgcgtcaattctcctctagaaatacgtttgagttcttaaatagcgatttcttatatagtcaatatgattactaacaattcattttaccatttattacaatcaaataaaaccctgtcacagtaaacaatccagccaattcagtaaaaatttaaccccattatctatatggctacaaaaaagggctgagcgcaactcatcgttgtcccagccctaacttaacgttcacttattcatcagtttcaatcaaaccgtaacgaccatcttgacgtttataaacaatgcttgtaccgtttgtttctgaatcttcgaagatgaagaactcatggcctagcatattcatttgtaagattgcttcttcactatccattggtttcaatgaaacgcgttttgttcgaacgacttgcattgattcttctggtaatgcttctgcttctggcaccgttaattccatacccttaatcccgcgttcacgtgatttacggttaatctttgttttaaatttacgaatttgtctttctaatttatcagtaactaggtcgacgctaccatacatatcaggcgatgtttcttctgctcttaatacaaggtatggtaatggaatggtgacttccaccttagcggttttatcggagtacacttttaaattaacgtgtgcagttgcggtcgctgaatcatcgaaatatttttcgagtttgctgattttcttttcaacataactccgaattgcgtcagttacctcaatattttcaccacgaacattaaaacttagcatatgaattctcccctttcacaaataccccctgtgggcacttgtcgctcggaactcaattctttcccgaggctttgttactgacttcattatatataatttgcgcgtaacacacaaataatatggtcctagtggactaaagtaattgcgtgaattggcagcgtttggtatcgcttgcggagacactgctgagcatgccataacgtgcgcccagtggtataaatatcatccaacaaaattaactgctgcaccttggaacccaacagcacgttctgcgcgcatttaaaaaattgcggcgttgctaagcgctctgcacgatttttttgtgcttgtcctttttcagttggtagcttctgcaacaatggggtcagtggaaaacagtcctcgtataagccaaccaccggattgaatccgcggctttgcaaatgtgttggatcagtcgggactgggatatacgccgtttgccgttgcacaggaaaattttctcgaatcagccgttgaaatacgtgacgtaatcgataatccccctgccccttatagcgttgaaaatactgttgcattggttcgttgtatgttaacaacgctcgattagtaaattgttcgcctggatacagttgctgccatctctggcaatccggacacaccccctgggttgtcatttgccgaccacatcccgaacaacactgcggcccaatccgttcaaactgtgccatgcaacgtgaacagatcatcgccggatagactggtcgcaatgaacaaatcaatgcaatggagggttgttcaaggataactgccgcacacattaaacagtggattgtaatcgccgtccttttcgattttgtcgtttaatttgttgacacgcacgctgaatagcgaccgtgtaatccgcgtagaaaaaataaaccggattggcagcatgctcttgctgtcgtccggctcggccagcaatctgtacaagcactgattcagtgaagaccacgtgttctgcaccaagaacaaacactgcaatatttttaaacgttacgcctcgttctagaactgtcgtcgtaatcagcacgtccccgcatcctgctctaaaggccgctatcttgtctaattgattaggatcgccagcatgtaccgtgttcactgtaatgtgtggcaatgcccgaacaacgctctgctgaaccgcctctaaatcccttacctgtggcacaaataataataagcgttgttcttgaagacacttcctgagtaagttgcgcatcacggatggtaactgatgccgtttaactgaacgccgccacgtaaacaagggatagcaatgcggttcaggtaataagtgaccatgaaagcgaattggtagctcactacccgttaaatcccctgtattaatcgcatggcgcaactttacagttggtgtcgccgtcagatagatcaatgcacagcatggcttacacgcctgtttaacagccatctcaagctggggattattgacaaatgggaacgcatcaacctcatcgacaatgacagtgtcaaatgcctgataaaacttaaataactgatgggttgtacaaacaactaacggcgtataccggtaaggcgcagtctgttccccatgcatcagcatgattggtgtgttagcaaacgctgcttgcaagcgcggatagagttctaaacaaaccgccacccgcggcgcagcaacacacacacgctgcccattagctaaagccgtcgcaatgccttgaaataacatctcagttttaccagcaccggtcactgcagttaagacatggcgttgttgcttggtaatgaccgcaacaatctgctttgcggcttgtgcttgaaaaggggttagtgtccccgaccaagttagcggttctacgatcgactcaaacagattgcattcaggcacgtaaaccaactgatccccttccactaaccgcccaaaggtcaagcaagcagcacaataataccgaccatcaggtaagcgagcttgctctttcaccacttgtccacaccgttgacataccagacgctgattaactatttgaaacgctagtcgctgtttaatctgtggtaaactataattattcataacggtactcaattgggtggcactccactgacgaccataagcaagttgttttgccatcatttcaccttccacccttagttccgttaaatccagcttattttttcaaggagtccggtatgcaaagttattttaccgttcaaaaagacggcgaatttgaactcgaaatcaaaaagtcacgcttcatctgtcatgttgcgcgtgttacagacgaaaccgcagcacaagcgttcatcgcacaagttcgcaaagcaaatctgaaggccaatcataattgtttcgcctaccaattaggtttaacggccaatattcaaaaacaaagtgacgatggcgagccaagtggcacagccggcgtgccaatgttagaagtactgcgccagatgcagctcactaatctgtgtgtcgttgtcacccgctattttggtggcatcaaacttggtactggtggtcttattcgagcatacagtcacgccacttcggccggacttgaacacctcggtattgtccaaggtatcgaacaaaccgcttgtcagattacaattgactacgctcaatttgacactgtgcaaaatttacttagccaattaaacctcactgccgaagacatccaatatacgactaacattcaaatgaccgtctggttagcgactacagcagttagtgatttacaacaacaattaaccgaacgcctcaacggccaattacaattcgaccttggccctcaacaattcaacgaagtccccattagcgcacaggatttacaccagattcgctaccaataacgcaagaaaaggattagccaatggctaatccttttcttcattcttcggttttaataatcgttttaaaagcatcaataatgggcggcgattgtcaccaagtaacccaattgattcaacaaataattctaagccaattaagacggctaccgtcaatgccaagcttccccagagtgtcgatagtggatagagcaatgaaatcaacgagaagaccaatgccagtccataaatcacgagaaccgtttggcgatgtgataaaccaagttgcatcaaacgatggtgtaaatgatgtttatctgcttgtgaaatgggctttttattcaaaattcggcgcaacattgcgtaaattgtatccgtaattggtacaccgagaataataactggaatcaataacgtaatgaacgtcacgttttttaaacctttgagcgataagaccgcaatcataaaaccaatgaataaggccccggtatcccccaagaaaatcttcgctggatggaagttatgtggtaagaaaccgattaatgcagcgaccaaacaaaaaatcatgattgagacgctgacattggtgattgataagaagaaataggcgatgacgcccattgtgaagagtgcgataatcgaaacgccagttgctaagccatccaacccatcaatcagattaacggcgttggtaattgccagaatccaaaaaatggtgattgggaagcttaaccatcctagttcaaaggtgcctaaaaatggaattgtcaaaatattcatgcggacgcccgctaagaaataaatgaccaatgctgctaataaaataccgagcatcttttcctttggattcaattccttaatatcatcgatcatcccagtgatgatgatgatacattctgctaagaagatactgaaaagttcgtgtgtttggaattgcccgcgtaataatacgaaggtcccaaacgtaaacgcgataaaaatggccagaccacccattgccggcatcgcctttttattcactcggcgggcatttggtttatcaactgcgcctaaaacaaacgcgaggcggcgcactaatggggtaattgcggccgatacgagcatcgtcgcaaatagaccaactataattttaaacatgggttgcattcaacttgcctactttctcttgcattctctttattatacaaatcaaacccgttaaacacaacaatgacttgatttcttaagcaaaagccaagcaccctgattatctgtcccgcacaatctgggctaataaggccgtaaatcgtggatcagcattaaagggatgaatgtaatcaaattgttcgccttgattatccataaaatagtcccgattttcaacatcaatctcttcgatagtttccaaacaatccgcaacaaagcccggggttaggaccaaaatttttctaacgccttcttgggctaatgactgcatcgtagtgctagtggccggtgttagccattcattcggtccaaacttagattggtatgtggtccgaaaagtttgtttaggcaagcgcgcctgcaatagcgcagtagttgcttcacactgtgcttggtacggatccccttttgttacgtacgactttggaatcccatggtatgacaaaataatttcgtcataggtttgcgtctgtagcttctgttcaatcgccgttgccatcaagtcgatatagcctgagcgttgataaaagtccttcacaaaatgcaaagttggcatgtttgattgttttaaataaaactgcgcaactacatcataaaccgacatcgtcgtagtcgttgaatattgcggatacattggcacgaccgtcaaatcatcgattcccgccgtttgaatctcactaagcacatcggttaagaatggttgactatatgacatcgcctcaaaaacttgataatcgggtaattcagcttgtaattgagcaacttgctgttgcatgtacacttttaatggggagccaaaccgctttgggcatcgcaacgacccgctgatcagctaagaaatgttttaaaaaatggcgaatttctttgacttctggtttatctggggtccccaaattaactaataacacaccttctttcatgataatgtcctccacaattttaattaaaaccaaaaaaagagcggggaacaaaattggttttgtcccccgcttcaatgttaggccaatccgcattacttcgcgtattcgaccgttcttgtttcgcgaatcacagtcaccttaatgtggccaggatactcgagttggttctcaatttgattcttcacatcacgtgctaagacggttgcttggtcatctgtgacttgttctggtttaacaatcacccgaacttcacgacccgcttgaatcgcaaaactatgatcaacacctttaaaactattcgtaatactttcaagtttttcaagacggtgaatgtagttttcaagtgattcagaacgtgcacccggccgagccgctgaaatcgcgtcagcagctgcgactaagactgagataatcgatgttgcttcagtatcaccatggtgtgaaccaattgcgttaatcaccgttgccggttccttataacgcgttgctagttcaaccccaatttcaacgtgggagccatcgacttcatggtcgagggccttaccgatatcgtgtaacaagccagctcgtttagcgagtgtcacatcttcacccaattcagcggctaaaatccccgttaacttggccacttcaattgaatgattcaagacgttttgcccgtaacttgttctgaaatgtaatcgaccaagaatcttgattaaatcaggatgcattgtgtgcacaccaacatcaaagattgcttgttcaccgatttgtctgatttgttcgtccatttccttgcgtgacttatcaaccatttcttcaatccgagctggatgaatccggccatcttgaattaacttctctaatgtcatgcgcgcaatttcgcgacgaatcggatcaaacccactaagcacaactgcttctggcgtatcatcgataatcaggtcaatcccagtcagtgtttccaatgtccggatattccgaccttcacgaccaataatccggcccttcatatcatcatttggtaacgtcacaacagttactgttgtttcagcaaccatatccgctgcactgcgttgaatagcttcagcaactaatgtacgcgcagtccgatcagcttgttctttagctgtttcttcactttctttgattaaaacagcccgttcatgttcaaggtcttgtttcgtttcatccaaaatgattttttgcgcttcatcatgcgataattcggcaatttcttgcaacttcgctttttgttgctcaactaaagtggcagcttctgcctgcttttcagttagctcttgtgcttgattcgttaaacgattttcacgttgctccaatgaacgttcttttttatccaacgttgcatctttgcgatccattgtttcttcccgttgaatcaaacggttttcttgcttttgtacctcactgcgtcgatctttcaattcattttcaatctcagaacgatagcggtgattttcatcccttgcttccaaaagaatttctttcttccgcgttgcggcttctttttcagctgctgcgattattcctgtggcagtcttatttgcaccatcaatttcacgttcgtgcgccttcttttgtagaacggaaccaactagtaaaccaacgattaacatgatgactgcgaggattaatggaaaagctaagttcattgtttcacctccgcatcatcaaaaattttgaattgcaactttcactgcaaatttttaaagatgttattatgtttagtttttcaacacatagttattttatagtttcataaaccgcctgtcaacttaaactatcggcattgcaaccgttttcgagttcagtcaatcaaatcgaccatcagaataattcggttaagcaatcaaaaaagctgaagcaaaataacttttgcctcagcttaatgattcttattcgtttgaatcgtcatccgtaaagacgtcgagttgtgtttcatcgctttcatctactgggacatccgaaataccatatgcttcccgaactttaagccggacttcatcttgaacttctggatgatcagccaagtaattcttcgcgttctcacgtccttgaccaatgcgttcatccccataggaataccatgacccactcttattaataatgtccttttcgaccgccatgtcgaccagttcacccgtttgtgagatcccttgaccatacataatgtcgacttcagccactttaaatggtggtgccaccttattcttaaccactttaatccgcgcacggttcccgatcatatcggtcccattcttgatggtttcagcacgccggacttcaagccgaacggttgaatagaatttcaatgcgcgaccaccaggtgtgacttcggggttcccgaacatcacgccgactttttcacggatttggttaatgaataacgcaatcgtctttgttttattgattgttcctgataatttccgtaaggcttgtgacatcaagcgggcttgtaacccaacatgcgcgtcacccatttcgccttcgatttcagcacgaggcactaaggctgcgactgaatcgacaactaaaatatcaacagccccacttgaaactaaggcatcggcgatttctaagccttgttccccagtatctggttgtgacaagagtaaatcgtcaatattaaccccgagggcagttgcatacttaggatccattgcattttcagcatcgatataagcagcagtcccaccttgcttttgcacttcggcaacagcatgtaaggcaacggttgttttacctgaactttcaggaccataaatttcaacgattcggccacgtggatacccacctacaccgagcgcttcatccaatgcaagggaaccagatgaaacagttgagacttgtgtatcaaccttttcacccattcgcatgattgagcccttaccaaaattcttttcaattttctttaatgcagcatctaaggctgcttgtctttcatctttagccaattaagtgccctcctcaaaagagtccttttcagtactctcttagtttaccgatttcacgaaataaaagcaagtaaaaatcgaacaaacgttctatatattttttaagctactctactatacccgaatcaccgcgtttttttcgtgctttttgggttaaaaaaactggcgtgggattccccgccagtttaagtttatttagaaaatgagtctttaaagacgcctctgttcttgatgaaataatcggtacccgaataaactgtaaagaacaagcaaacgtataacatgatctgtgccattggaatgccgatattgttaaagaagacgttgttgagtagcaatagaataatcgctaacatctgcgtcgtcgtcttaatcttacctggcatagctgcggccatcacttcgccaccttcgcttaataataaacgtaggccagtaacggctaattcacgccaaataataatcgcaaccacccatgctggcgcttgatctagcgccactaagaagataaatgctgtcatcactaataatttatcagccaatggatcagcaaacttaccgaagttggtcaccaaatgttgtgatcgggcaatcttgccgtccagtaagtccgtcaaagaggctacaatgaaaatcactgttgcaataatcgcactgactggaatacttgtcccagcgaccataatggctgtcgcaggcacatccaatactaaaatcaaagtaaaaatcggaatcaaaataatccgaaacatcgttaatttatttggtaaattcatgttgaagactccttaatgtcctttatttagccaatgttgctgtgaaattaatcgtccgcacaaacgttgcttcgttatttggactaaggttaatatcggtgccattaatcttcatcttcgttgcaggtgcattcccagtttgaatactaaattgcgtaacgccttcaggtaattcagcagtttgttcggcaccaactgcgacagaaccttgccaaatttgttggccattggccgttaagctgacccaagcagctgatttatcagctgagaacgtaatttggttggctttagctggcaagttcttaatttcaaaagcttgttgtgacccattaatgctggtcatcttcgccgttaattcttgcttcttagccttatcttcagcagctttcttgctagcttcttgtgccttactttcagaagcggctttcttactgctttcagcagacttgtcttcactactgttatccttcttaggatctggtttatccccagaaaccgtaaccgatgagcttgtttcgtttaacgtttcgcggtctttaccacggttgctgagcgcaatcccatagaccaccccaataatgatgaccacaattgccacaatcgtaatttgtgggacaaggttgcgccatttcgaccatttagaatctgttgtttcgcgcgtcaatcgggtttgattttcaacggatttttcaacatattcttctggtttcgtatctggtacagcatcttggtattctgccaacaatgcatcattatctaagcccactgtttgggcgtattgcttgataaatgcccgcacgtaaaaactgccaggcaaggcatcaaaattgccctcttcaatggcgattaaatatcgtttttggatttttgtgatttgttgtaaatcatcgagtgtgtagcccttttcaattcgtgcttcacgtaatttttgaccaatttcattcataatcaattccacccactattatcccagtatcattatccataattatagcatattggtacgtatgtgcattattaagatttctttattttaaccaaccaccattaacgtacaatgtctgtcccgtcatataatcggctgcaggtgccattaaactcaatacccaataggcaatctgcgctggggttgcaaaagcaccggccgggatctccgctacaacagcagcccgttctgctgttgtgaactgattgttcattttcgtatcaactgcgcctggtgcaaccacattaattgtgattccaagcgatgccacttcctgtgcataggcgttcacaaaggcggattgtgcgcctttaactgtactatatggcacttccattgcactgccccggccaccatagattgaaccaattaaaacgacgcgtcctaatggactttgcgctagtttcgcttgcagctgctgcatcaatagcattggtgctttaacgtgcacctgccataagtgatcgagtgccgttgcactgacctctggcaataagccatacgtcgtcgcacctgctgtataaatgaccgcatcgacttgaaaaagctggcctgtcaattttccaacagcgtcctcttgggttaaatcagcttgaagcgcaaaaaaatcctgttttgggtagtcttgcaacaattgcttttgcagcgtcgtaacccgcgtctgattttgatgatagtgtaaataaagcgaccaaccgtccgccgccatttcagtcgcaaccgtcatcccaatatcaccggatgcaccgataattaaggctgatttaggcatggtttgctccctccggtaagatgtggcagactgtcatcgtttcaattttgaaataatcggttgccatctgttgcaagtccgctaaagtcacttgttcgatcaaacctaagacatcaaatggactgatttcggtaaagaattcatcactatattggttcgcaatggcttctagcgaattgaacgcttgcaagtattcaccaattgcggctcttttaaccaacgccaagttatcctctgaaaagtcaggactttccgtggcatgttctaagatattaataatcgcatccgataattcttgggcattgtccgcatcgccaccaagggtcacaaaattaaatgaccgttgaatggcaaattcgtaaccaaaactatcatcaagtgtgccatcatcgtacaacttttgcacttgcgttgatgaatcaccaaatagcaattcaagtaacaagttcatcttcaactttgtttcaagtgctaactcacctgttccgtaatccgttaaacctttaatcccgaccatgctcttgctacgcgtaattggcatttcaagtgaccgatacggaatgatatcatgaccatcttcagcttcttcaggcaatgaacgtacaatttctgttggttgggcaaatgtttttgccgcttgattggcgttcaaccaatcaaccacttcatccggatcatcaatttgcccaacgataaagaggttcatattactaggctgatagaacgttgcatgtgcttgatagagcgcttctggtgtaatttgcgcaatactctcgaccgtgccggcaatatctgtccgcaccggatggcttgggtaaagattgccaatcactgtatagaataagcgccaatccggttcatcattatacatctggatttcttggccaatgatgcccttttctttttcgaccgtctcagttgaaaaataaggttcctgcacaaaatcaagtagaatatccaaattttcttgcaagtgactggttgttgaaaataaataactcgttcgcgtaaaactcgtaaacgcatttgagcttgccccgtagcgaccaaacttttcaaacgcatcgtaatcttttttctcaaataatttatgttccagaaaatgcgcaatcccgtctggcactgtcacataatccgtttccccagctgggataaacgtcttatcgattgaaccataattcgtcgttaagattgcatatgtcttatgataaccgctcttagggtatattttaacggtcaagccattctctaattcagtttcatagagggtttcacctaagcggggattttgtctaagcttcatctgtatcgacccctttcaggaagtaaatggcttgcaattgcatctttgcggcttgttcttgaaccgcttgtttagaaaccgccaagatggcctgtgtaaatcgctctgcatcaatttcagtttcaggcacaaacaaacgattaaattgttgttgccccaaataggccgcactatcgagactcgatttaaattgattaatcaaggccaacttagtttgttcaaagaccgcctgttcaaagtcacccgcgataatccgttgacgttgggcttcgataatctctaagacgcgatctttttggcgactttcaatcccagtctgtaccgtaatgacaccccgaaaagcatcgattgcacttgaggcatagtaggctagactcgctttttcacgcacattggtaaaaagtaacgacagcggtgtgccaccgaataaggcgttcatcaccattgtggcataataatcagcttgatagaagtaagctggcatttgataggccatgtttaacttgccttgttgcaccgtttgtacttctgttttagtttgcacttgtggatataacgattgttgataaaaaatcgttggcagttcagcattacgcggtgcaaatggcaattgtgccaaatccgcgaccgttttggcttcgtcgatattaccgacaaacgtcatttggacccgatcgtttgcaatcatcgattgataatacgcatatagttcatccggtatgatggttgctaaatcagctgcatccccataattgggaatttgttgcgtcgcatctttaaaatagagtttgcgtaattcaaccgccgcgtatgattgcttatcatcggcaacactttcgatgtaacgcactaagttctctttttcacggttaaaaatgaccggattgaactggccatcaaccacatctggatgcaataataattgcccgataaacgcaatcgcttgctcttgcaagtcgattgtatcccgtagatattgggggctcacaattcgcattgagatgctaaaaatcgccaagtttccttgtcgataggcattcatattaaagccggcaccatacatggcttgtaattcattcgcaattgcgacttggtcacgataggcttggctactagcacctagaacgctcgctaataatgagcgtcgggtcatcccatcagctgtgacgggcgcaattaattgaacggttaatctaattgttttaaattggttagtttgtaaaatattcaggtagacgccatccgttattttctgattcacgttatattactcctcactgtttcaacagttaaaatggctcttttcaacttatcctttttcatagcacggattctatcataccaaaaaaagaaggtgaactcaaaaaaggccgcgacaaaagtattttttgtcgcggcctttttcatttaatagtttaaccgagttccatcaaccagcgcctttcagttaatcctgaatgtcaatcaatcgctgacgcgcttattcgccattttaggcgatatttgacttatgtcacacgctattgttctgttggttcttctggtacgttttgtaataacaccttgcgtggcttactaccttctgatggtccaatcacaccacggctttccatctcatcaaccaagcgtgcagcccggttatagccgactctaaaacggcgttggagcattgatacgctagcggtttgctgtttaacgaccaattcgactgcctcttggtaatattcatcttctggttcttcagttgattgcttttcctgctcagtggttggaatcatttcttcgtcgtattcagccgtttgttgtgctttaataaacgacacgatactttcgacatcctgactcgaaatgaaggcgccttgcacccgtaatggtttgctcatcccgattggcatgtaaagcatatcaccacggccaagcagtttttccgcgccactgccatctaagatggtccgtgaatcaatcccactggatacagcaaacgcgatccgcgatggaatattggccttaatcaacccagtaataacatcgacagatgggcgttgggtagcgacaatcatgtgaatccccgccgcccgagccatttgtgccaaacgaataatcgcactttcgacttcgttgctggcaaccatcatcaaatcagataattcgtccacgatgacaacgatataaggcagtggtgcacctttaatttcgccgtcttcgttgtggccttgaatatactgattatattcaatcatgttccgctgacctgtatcggcaaataattgataacgtcgttccatttcttttacaaccttgttcaaggcgttcgcagcctttttggcattcgtcacgacaggaatcaatagatggggcacgccattatagacgtttaattcgaccatcttcggatcgattaacatcaatttaacttcgtgtggtttggcactcattaaaatacttgtgataatcccgttaattgcaacggacttcccactcccggttgaaccggcgattaataaatgcggcatcttggctaaatccgacatgatgaccttacccgaaatatctttacctaacggcacagcgagtggtttgcctggatgtgggggttcttgttcaatcatttctctaaaggaaacggtcgaaacggtcgtgttcggcacttcaatcccgacatacggtttacctggaattggtgcttcaatccgaatatccttcgccgctaatgcaagcgccaaatcatccgctaagttaacaattttagagactttcaccccaactgccggttgaatctcgtacttcgttacggctggtcccagactagcactcttaaccgtcacatcaacaccaaacgaatcaaatgtttgtttcaagacctgttgattcttctcgatggctttatattccgcactctgatcagacgccggaatttgcgttaataatgctggtgttggcaattcgtaatcatcatccgtctcgttcagtggtgcgagttctgccacatctggaacatgctcatcttcgtcagccaccggttcgggtgcagttggttctgcttgcgtcgcaattggttttggtagatccttgggaccgtttattttaaaaggttccaatttttgcttcggtgcattttctggaccatccgttgcgaccatttgctctttagtctctgacgtctcttctgcttgttcagttgcattttgaacagctttttgcgtctgttcttttaaagcactgacttgcgctttacctttttcagagaccttttggaaccctgatttcgtgtagccgccagctttaaagagcccatgcacaaaccgttgtgtactctgaacaacgacgctgaatggaatatctaagaaaacaaaaacgccgataatcacaatcaagacggctatcagataagtccccatctgcgcgaacaagaagtggaaaacaccatacaacgcggcgccaattaagcccccgccaacttccgtcgtaacggccatcttctggaagtcttccaataaaagctgccatgtggcggccaagaaatggttattgaccgcttgatggtgcaagacgaatgctgacaaccaaattaaaatcccgagatacgcgattgcaaatccaagcgtcttttggtgccataaggggggctgcttgccataaatcaacaaatagacccccaaaagggcgaataaaatagcactaataatgaacgtatcgccaacaaacagacggaatacgttagcgcaaagcgcgccgataaagcccagctttaaacccgcaaataaactaattaaaataaaaataaacccgatgatgttaactgtgaaatcagtttgttgttttttctttttgcgtgctgctggttttctttttttacttttagtggccatgaaaatctccttcaaccttaaatcctactatccattatacacgaacatctgtactactaaacccataaatgtcagtcccgtaccgtttttaatcacggtactaaaaaaggccacggcaaaattgccgcaacctttcgctgattagtcttcgttggcttgcgctgtaaattggagttgaacgccccgatttaaagcaaccgccgtcacttgatacgtcaatgtttcgatgtattcaatcaatggtcgtgaaagcttcatcatgtctttttgatcaatttcatttggttcaccaaagaaatctaagagttgaaccacttgtgaaatttgacctgacactgcaaagccactcttttctggtgcaacttggaaaggcgtcacaatttggtaaatattccccgcgctcaaatcagcttcttgtaaatatggatcttcttcgctgatggtgactaagctgacttggatattttgttgtggttctacatcaggtgaaacacggtcataatgaaaagcatcaacagtaattggatctttcttcgtttgcatcaaaaacactccctattttaatttatcattgtcgtacaaatgactcttttcgagtcctggaaaatcttgttggcgcaatgcctcaaagatcactaatgccgcacagttcgagaggtttaatgctcgaatatggtcggacattgggattcgtaaacaccgatcttcattttcacgcatgaaagtttcaggtaatccggtcgtttccttaccaaacataaaataatgatcaacacttgtatccgacacatcttgatcagaataagcttgcttagcaaacttcgtaatcaagtataaatattgacgatcgggcacagttgctaaaaaggcatccaagttcttgtgataattaatcttaacttggtcccagtaatcaagaccagcccgttttaaatgtttatcatcggtttcaaagcctaatggttcgattaaatctaaaacagtatctgttcctgcacatgtccgcgcaatattaccggtattggcaggaatcagtggttcgtataatacaatatgattagtcacggtctaaacttccttaaaaaagattcagtagattaattatacaatagaattcacaaaagctctaccttgctttgcaaataaaaaaacgtagtccctcggttattcacggcgagaaactacgttagtgtcatttcatcactagcttttatcaaaataaattctgataaaagttagggaaaaaattccttaaaaacattatagcgcccttattttagagttgcaatcagatttttaaactttctttaaattctcatcattttcccactaaaatcgtgacatctaatgaaatttcaggtagcgcttctaacgtgattgccgctaattgtgccttagaagccgtccacgtcaatggcgtcatttcgaccaaatcgcgcaatgtctcgggtgttaacgtcattgttttttgaacttgcatttcttgataatctggaaaatgttgcgcaaacaattctaagaccggaccatgatcatagctttccttagcttgaccatgatacagtaactcccgtaactcatgtaagtaacccgcattgggaaccaccttaattagttgaccacccggtttcaagacacgtttaaattcttgatattgcgaaggcgaaaagatattgagcaccgtatctaactggtgatcagcaaatggcatccgcgctaagtctgctgcacaaaaccacgcatcggcattgtaatcacttgccaattgaatcgcaggtttagaaatatcaaacccgatataacgcgcggaaacttgcgcattgagctgttgcactggcgttccttcaccacaaccgacatcaaggactaaactatcgggggtaatccgtgatgcaatttcttttaagaacggttgaaagaaccctgcttgtaaaaaagcccggcgatgttgcaacatttccttggtatattcagacttcatttgctttgctaaaaaatataacgtgccatttttagcgaggtcaaaactatgcccattgacacaaagtaattggtgctcggctacacttgcaaatacgtcctgacagattggacattgtaatacggccaagttcgtcgttaaaaactgcttggctaactcaatttttttcaaatttctgattctccttgatttaacgtgctttcaaaagcatcccgttccggttagctacattagccaaacaatcggctacgccgcttattcgtctaattaggctaatcctcacaggataaccgcttttgacgcacttcttttcttaacgtactttcaaaccatccttttgcggttaactacgtccagcaaacgatcgacgctgtcgctcattcacgagactaggttaatcctcaaaggatacccggtttgaacgcacttcttttataccgcactttacattcttaaaatatccagtagacttaacagtaagttattgatgaaggaagtgacaccatgctcgaaacctatcgcttcgacagtgctaagaaaaagctcaccaaacatgctaaaatccagtccaacagttggattaacgtaactgatccctcgactgaagaaattgagcttctcactaagaagctccacatcccatctgattttatctactatagtttagatgctgatgaaagtgcgcgtgctgagcacgatcctgattataatgcgaccctgattattttcaacataccaattcttgaaaaagacccgcaaaaaccagataaatacctctataaaacaagtcccttaggaattattgtaacagattcgaccgtcttaaccatcaacaaaacgccagtcacctttttacagagctttgttgatggccaaattaaaggtttcaatccacaaaatcaccgtagaagtgtcctccagattctcttccgcatttcatccatctatctccaatatttgcgggacatcaaccgctctcgtgaacaaatcgaaactcgcttgcagagttccctacagaatgaagaactcttcgatctgatgaccattcaacgcggcttagtttatttcatgatgtccttaaagaccgataaaatggtactcgctagtttaatgcggaccaatatgttagatcttaatgaagatgaaattgaattgcttgatgatattcagattgaaaatcaacaagccatcgaaatggcagaaatttccaacacaattattaacgaaacagccgatacttactcgtcaattattaataataacatgaatagtgttatgaagttcttggcatcttattcaattattctcaccatccccggattagtatttagtttttacgggatgaacgtggaccttccactgtctcgctccaaaacaagttggttgattactttattcatttccctgatcatttctggtgtgctagtctatcgcttctggcgcaagcggtacattaaatagagcgtgtgccagctcctgcggattagaacccgtttaacttacaaaaggccactatcatcaaacacattctcccattctttgggttcgaatgtgttttttatttgactttcataaaaaagctcgttattatacgttatgcacggataaattccgtgttatccaaaataaatgttcgtttttaaggagaattcccaatggacgtatttgattacgaagatgttcaactgattcccaataaatgtattgtgaaaagtcggagcgagattgatactagcgtccgctttggctcagaaacgtttaaaatcccagtcgtccctgctaacatgcagacgattattgatgaaccgcttgccatctggcttgccgaaaaccattacttctacgtcatgcatcgatttcagcctgaaaagcgtcccgcattcatcaagatgatgcacgagcgcggcttatttgcctcaatcagtgtcggggttaaagacgatgaattcgactttattaatcaactcgcaaccgataacttactaccagaatacattacaatcgatatcgcccacggccactcacaagtcgtgatcgatatgattcaacatatcaaaaaagtactgcctaagagtttcgtcattgccggcaatgttggtacccctgaagccgttcgcgatttggaacgcgcaggtgcagacgcaaccaaagtcgggattggccctggtaaagtttgcatcaccaaaatcaagaccggctttgggactggtggttggcaactggcagccctcagatggtgcgcgaaagctgctaccaagccgattattgccgatgggggaattcgaaccaacggtgacatcgctaaatcaatccgttttggcgctagcatggtaatgattgggtccctctttgcaggacacgctgaatcacctggcaaattagtcgaagaagatggtcaacaattcaaagaatattttgggtcagcttcagaattccaaaaaggcacacaccaaaacgtcgagggcaaacggattttagtgccttataaaggtgcgattagtgacacgctcaccgaaatgcgccaagacttacaatcatcgatttcttatgctggtggtaaacgcttatcatcattgaagaaagtcgattacgttcttgttcgccattcaatttttaatggtgacatgctttaaaaagcagttaaaagagccagactaccttttaaatcggtagtttggctctttttagttaggtacctaaaacttctctgaaatggttgaatccgacttgaaacaactgtataattacccgtgtcgcttttaaccttagcgtctacattgatcagaaaagggtgtgaaacaaatggatattaaacatacacttggagataacagtgttatctttcgtgatgcaacatacattagaagaacggtgtttgtccgagaacaaaatatgccggaaacacaggaaatcgatgcgcacgaagatcacacgattcactatgtaggttacctcaatcaagacccagcagtaaccgcacgcgtgcacgtcttaaaagacggtggatttagaattcagcgcgttgctaccatcaaagctttccgtggccaaggactcggctatcaattaatcgaagccatcattgaagacgctaaacgcaccacaacgccttatattattttattcgcacaggaccacgccattggtttctacgaaaaattaggctttattgtcacaagcgaaggcgaaatggaagcgggcatcccccaccactacatgaaattaacgctctaaaaaccaaaaaacgcacgatccgcatttattacggatcgtgcgttttttattgctcgtataagcctgaaactgacttgaaccattcaaaaaggtgactaattaatatcttgataatcgcatatactggaataccgagaatcacaccggcaaggccgaataactttcctgaagccagcaacacaatgattgtcgtgaccggatacattgccatcttgctccccaagaccaatggggaaactaaacgaccttccaaggtctgttcaacagcaaacacgatgagtactttaatcaataataacggcgagataaacgctgcaataatcactgacgggaccatcgctaggaaagagcctaaatacggaattaagtttaaaatccccgctaaaattcccaacgtcaacccgtacttcatcccaacaatccagtagcctacagtaaacatgactgcaacccaaaacgctactgtcaattggccgcggatgtactgactgacctgtgtgttaatttcttccaacactttcccagttgtggcgcgtactttaaccgggaagaattttaacaaatagcctttcattcggtgaccatcttttaacatgaagaataaaatgaacggcatcgttacaatcgcgatgactacgttcgtcaccactccgaccgctgttccaatatgactaacggtcgaagtcagcattttatttactttacttgataaattactaaacacatccgtattgatatcgtttaattgtttttgaatcgatttgaaggctgggtcgttaaaccatttcatcgtctgagtttgaatattcgcccaataagacggccactgatcaattaaactcgttgtctgggattgaatgattggaataatcgtcgcaattccccagaccagtaagccaacaattaaaataaaaataatcgtaatcgacaatacccgatttaaatgccaacgccgttcaaaccaatcaattaacgggttggtcaagtaatacaagacggccgcaataataatcggtaacccgataatcaacatcaacgactgaattggttttaacagccaagcaagttttgttaataaaagtataatcagcaacgttaataacatgtttaacaaaacaatcggtagcttcttatttaaaaaccatttaaagaaccatgaacgttctgtttgtggctgtttattctctgtcacaccaattcacctaattcctacatagtttcttgatacgttatctgcgttcctactttgaattcaggaacagccggaacacccgcggcggctggtgttaaataaagcccactttgcagttgatcttcttgtggcgcaggtccaaaaactaaagcgacatgaccaatactgttgaggttaggatttaccaacgcgcccacatacgtaatcgtataaggttgttgattaataataaccgtagaatctgtcgtcagtgttagctgttttttggccgcttcgtccataaaatgttgaatcaatgccacgttttgaatggcagttgtcgcatgttcatcgaataaaatgaccatcggttcttgatcatcaatggcgtcgttgccaattgaaatgacttctgcttgcgtgttcataatgaaatctcctcttagttaagatagtatcattgtagcatattcgcgacttagttttagcgactagtgaatccttttagtaacaaattaaatcgttttcgcaggaatatgctatactcaaagagtatttgacgaagggagtctgattatgacagaagaagttttaattggtggttatacccgccggattggtaaagggatctaccgcggaattttcgatgcaacaactgcaaccgtgagtgacatccaaccattcattaatctcgataacgcatcctatttaacgatttcaaaccgcaacatcctctacaccgtcattaaagatggggaccaaggtgggattgctgcctatgacttagctagtggcacccctgtctttttgaacgcggtcttagcagccggcgcaccaccagcatacgtggcagtcgatgaagaccgccaactcgtttatgcagccaattaccataaaggcgaaatactcgtttatcaaatccaagccgatggcagtttaaccttagcgagcacgacagttcatgaaggccacggtccgcgtcctgaacaagctagcgcccacgtacattataccgacctaacacctgaccaccgcttagtggtctgtgatttgggcaccgatgaattagtaacttatgccgtcgacaatgctggtcaattaaccaaagtagcaatttacaagagtgaacctggttttggcacacggcatttagtcttccatcccaatcacaagacagcttacctattgggtgaattgtccagtgaagtgacggtcttagattatcatgcagccgatgggacttttagcgcggttgctacctactcaatgttacctgcagattggcatgaaacaaacggcggcgctgcaatccgtgtttccaaagacggtcgtttcctttatgcttccaaccgtgggtataattcaatcgttgtgtatgccatcagtgatgacagtcgccaactacgagcaatccaacaaatgtcaacggatggtgaattcccccgtgacttcaatctttccgctaacgacgattttctattagccgttaaccaaaatagtgataatggtacgctttatcggcgcgatgcccaaactggtttattaaccgcctgtcaaaaagacttagaaacacctgaaggcgtctgtgtcttattccattaaaataaaaaagattgaccgtattggtcaatcttttttatttacttcttttacgatccattaaattaataataattgcaatggcaattaacacaattgacgcaaaataaatgaagtgtaaaccattgtatagaatatggcgtaatgttggtaataattgtttaggtaagttcaaagcagtttctggattaatcaattcatttaacatgttttgatctaatcgaccatcaccagcaatcccttttgccaattgccgattcaaaataatcccataaactgaaaccatcaaggtttgacctaaagttcgacttaacgtattaaacgacgttgcaacaccaactttgtcagcaccagcaacgctttgtgccgtaacagtcgtcgtggtaatgattaagccaaagccaatccctaaaccagcagcaactaataagaagaaccaaaacggtgtggtttgtgggaccaatgctaagatgaagctcccaacaagtaaaatacacaaactaccggctagaattgttcgtggtgcgtgcttaacaagtaataggcctgcccataatgaggcaaaaatccacatcacagaactaggcgtcacaacaaagccccccatcgaggctttcaatccgaggatcccttgcatccacattggcatatagacttcaaaaccaattaagaaaccactcactaaagcagccactgcattttggacaacaaatgttcgatttttaaataatgataatgagataatcggatcttgtgcatgtttttcaacgcggataaagaggtaaaaagcaaccactgcaatcacgagcattgaccctaaaacgagcactgacggtttggcttcacccatgacttggaagccatatagtaaactcaaaagggccgccatcaaccataaactgccccaatagtcgactggttcagcactcgtcttcttctcttcttgaaggaagtaccagattaaaccaatcgtaataatcccaatcggtacattgatgaagaaaatccaatgccaggtcaacttatcaacaatgaagccccctaaaagcggcgcaatgatggaggcaatcccccatgctgacccattaaaacccaagactttcgcccgtttttcaatcggataaatatcagcaataatcgtaaatgataccggcataatcgccccggctcccaagccttgaattgcccgggaaataattaacgtccccatatgatttgacaatccacataaggatgatccgatgacaaacaaggccaaaccaaagatgaagattggtttacgcccaatccgatctgccatcttaccatagattggcgtcatcatcgcattcgttaataggtagattgaaaagacccagttcatcaatttcataccgtgtaaattactaatgatggttggcattgccgttgaaacaatcgtcccttcaatggctgtcatgaaagttgcgacgaaaatcgcaatcgtcacgagtaatacattcgtttttcttcccttactttgttccattcttagctccctctcttattcttgggtataaaaagagccttttcttaactcaaataagctaaggaaaggccgcctcttttactcgtctaataatacattaggcatttagtttagcaatacttgcctttaaggcatccactttatctaaacgttcccatggaaattcgacatctgtacgcccaaagtgcccatatgcagctgtttgcttgtatataggtctttgtagatctaacatttgaataatccctgctggtcgtaaatcaaagttttcacgaattgcagtttgaatcttttcttcactgacggtccctgtttcgaaagtatttattgaaacagaaacgggttgcgctacaccaattgcataggccaattgcacttcacacttgcgcgctaacccagccgctacaatgtttttagcaatgtaacgggctgcataacttgctgaacggtcaaccttagtagcatctttccctgagaaagcaccgccaccatgacgtgcataaccgccgtaagtatcaacaatgatcttacgaccagttaaacctgaatcgccttgtggtccaccgatgacaaaccgaccagttggattaatgaaatacttggtttgatcatccaagtatttggctggaataacggtttgaatcgcttgttcaagcatatccttttgaatggtttctaaagtcacatctgcatcgtgttgggtactgataacgacggtatcgacacgaacaggttgttcgttttcgtcgtattcaacagtgacttgcgccttagcatctggtcttagataagcgagttgcccgctctttcttaactcagcgactttgcgcattaaacggtgtgaaagggcaattggtaacggcattagttctggtgtctgatcgacagcaaacccaaacattaacccttgatcccccgcaccaatcttatcaagtggatcttcatcctttgcacgagattcaactgaatcgtcgaccccttgtgcaatatcaggtgattgttcatcaagtgcaacaatcacagcacagttatcgccatcaaagccataatgcccatcacgataaccaatccctttaatagtctctctgaccactttttggatatcaacgtatgccgttgttgaaatttcgccgacaactaggactaacccagttgtaacggttgtttcacaagcaactcgtgcttgtggatcttgtgctaacatcgcatctaagatggcatcactaatttgatccgcaatcttatctggatggccttcagaaacggattccgaagtaaataaatgtctttcttgcatttctatgtttccccctatatatgtgtcggttacaaggcctcttcacggtgtgtgaatcctatcgggaacttcttataactctactatcctagcacaaaatacaatccatttcaaaagccgttgaccttcttttcaaaaaaagttaagatgagacacatattctaagaaagaagtgttgctattgttctaccttaaccaacaacatctaaaggcttcaactcagccacaattactgactttgtttaattatttaaatctcggtttaatcgtcgggctgacaatgtggtcttttccaaagcaattcgggctttcattttatctaactgcgattctaggggcgctattagccattttactcgtcttatcaccccggtataaaccaaagcgaataattgcaactgctgcccttttagtcgcaattattctagccgcaatcatcggctggcgtgatctacctttgattgggcttctatcagggattactagcatttttgttctaatcccttttatctacccagaccagttcaaagaccgtacgttacggttatcatttcaattcttactagccccatttttctttttaattactcagattttcagtggcattcactttatccccgaggatttactcgtaaaattaggcctattcttaatcatcatttatcttctcgaactaacgactcacaatcggatgattactatcctcagttatgtagtatgggcgtgcattattattgcagtgattttaacgcatttaattcacggttggcatttaattctctttgcaggtggccagttattattaattgcgttacaactcggcctaatcaaacgtaactgctatttacaagagtttggatacttgctattaatcactggcgtctttaattaaaatgattaaacaacaaaaaagcgtaagcaataaattgcttacgctttttttaagacggtcacaacgggactcgaacccgtgatctcctgcgtgacaggcaggcgtcctaaccagctagaccatgcgaccgaatggaggttacagggctcgaacctgtgaccctctgcttgtaaggcagacgctctcccaactgagctaaacctccaaaaaaatgacccgtacgggatttgaacccatgataccgccgtgaaagggcggtgtcttaaccacttgaccaacgggccatgtcatttattatttaacggagagtgagggattcgaaccctcgaaacaggttagacccatttacatgatttccaatcatgctccttcggccgctcggacaactctccaaataatttttttattaagcggaagttggtgcaaccaaaaagcacgtttagatgttcaaaatagaacagcaaaaaagctgaggttgaagtatttcttcaacctcagcttttttatttttgtctagtccgatcaatttcagtccgaatggctttgaaactttgttctgtttgtgggccattattaacggcgaccatcataaacagactatcgacgatgctgatttgtgcaattaacgcgtgtagtgcttcggcgcggtaattggtttcttcggaaatggacaacagtgtcacatcacccaatttagcgagggttgaattgccaaaactggtgatgacaatcagtggaacgtgacgttcttttaagatgcgtgcaatttctaaagcatctttattttgaccactatgtgaaataatcagcgcacagtcttgttcggtgagttgggtggcctgcatcaattgtagatggtagtcttggctgtaaacagttggaatcgcagttcgtaaaaatttgtggtagccatcttgagcgacgattccagaagcgcccaagccaaataaacttaagcgcttggcctggttgatataatcaacggcttgccgtaattgcgcttcagtcagtagtgaacgagttgctttgagcgcattagtattggatgcgaaaattttatcggccatggtcagatagtcatcattattactaatttcatggaagagtggattatctgttggggttgcttgtttagcaagtaacgccattttgagtgcctggaagtttgcgaaggtcaacattttggcgaaacgggaaatagtggctgttgaaacaccacagtcagccgcaaattcttgaatcgttaaactttgattgaaatgttcagtttttaagatgtaatctgcgatttgtttgtatttttcacttaaattcgtgtagtacgcacggagtaaggaatcgatgttttgtgtcattgaagtgcccccctgttatcgatagtatagcataaaaaacaacaaagaaaattattttctcaaaaagggttgattaaagaaaataatttacatataatgaagacattaataaaagtgacatgaaattgtggataaggggactagcaaagatgaaattagcaatgattggtttaggcaaaatggggattaacttggtcgctaacttacgacgtaatgggcacgaggttgtcgcctttgacttaaatgaagcagcggttcaagaagcaacccgcttaggtgcattacctgcaaaggatattgatgatgtggtggcacaattgccacaacctaaaattgtgtggagcatgttacctgctggtaagccaacacaagccacaatcgaaacgttaagtaccaaattgacagccggtgacattgtcattgatggtggtaattcatttttcgaagattctaaacaacacaatgcattgcttgccgcaaaagggattcatttcttcgatgtcggaacttctggtgggatgagcggtgctaacgcagacggaaacttcatgatcggcggtgacagcgcggaagtcttcaaacagattgaaccgatttttaaagatattgctcaaaaagatggctatctctataccgggaaggctggtagtggtcattatctcaaaatggtgcataatggaattgaatacggcatgatgcaatctatcgctgaaggattcgatgtgttatcacatggtgagtttgaatatgataacgaagcggttgctaaggtttggagtaatggttctgtgattcgcggctggttgatggaattagcggaatctgcttttgcaaaagaccctaacttagaaggcttaaaaggtatcatgcactcatcaggtgaaggaaaatggacattagatgaagccttgaaattacaagtcccaacaccggtcattggtttatcattgatgatgcggtatcgttcacttgaagatgatacattcactggtaaagttgtcgctgctttacgaaatgaattcggcggccatgcagttgataagaaataagtggtatcctagtaagtagtcagtaaacaccacataaacgaggtaattatgatgaaatatatgattggtgcggatattggaacaacaagtacgaaagcggttttatatgatttaaaagggaatgttaaagcttacgcaaacgttggttatcctttatatcaaaccgtacccgatatggcagaagaagatccggatgaaatttttaatgcagtgtcagaagtattacgacaggtgatgcgcaagggcaacgttcaagccggcgaattacagggcgttagtttctcggctgcgatgcacagcttgattctgatggatgcaaatgatcaaccgctaactcgggcaattacttgggcggataatagagctgctaaagcaagtcaacaattgaaagaaaatgggttgggccaagccatttatcaacacactggcacaccaatccatccgatggcgccactttcaaaactgatttggctgaaagaagcgcaacctgaattgttcaaccaagctagtcaattcatcgatattaaaacgtatgtcttccaaaaacttttccatacgtatcaaatggattattcaatcgcttcagcaaccggcttgttcaacatttttaatttagattgggatcaacaagcccttgaagtggctggtgtcacacgccaacaactacctgaattagtcgaaccaacggattatgttaaagggattgatccgatctatggtgaattaaccggcattggtgctgaagtaccatttatctttggcgccagcgatggggttttatcaaaccttggggtaaatgcaattgatccaggcgtagtcgccgttactatcgggacaagcggtgccgtgcgagtggttgttgatcatccagtggttgatccaaacggtaaattattctgttacgccttaaccaaggataaatgggtggtcggtggaccagtcaataacgggggaattgtcttccgttgggtgcgcgatcaactttttgcacctgaaaaaatcaaggctgaacaaatgcatgtttcaacatacgatattttgacacaaattgcggcagaaattccggctggttcagatggactcttattccatccttacttgggtggcgaacgggcaccaatctgggatgcagatgcacgtggatcatacttcggtttgacgcggcaacatacgcgggcgcacatggtgcgtgcagcgcttgaaggcatcgtttataacttatacatggtgatgctgatgattgaaggtgtggcaggtaaaccaaagagtattcaggcaacgggtggcttctcccgttcagaattatggcgcccaatgttggcggatgtctttgaacaagacgtcacgattccagagagtttcgaaagctcatgtttaggtgctgctgtcttagggatgtatagtttaggcttagtggatgatctatcagctgtcaaagaaatggttggtgtgacgaatgtgcatcatccagaagaagccaactttgaagtttatcgcgaactattaccaatctggattcgattaacacgggaattaaatacggaatacggcgcaattgctgacttccaacgcaaacatatgcaagttaaagagtaacgaagtgaactgggtctgaaagcccagttacttttaacaatatcatgatagcgcaaacattattgaaaatagggaaaattatggcattagtagtcctattattgggcattatcttattactcgcccttattattcgatttaagatcaatacgtttatcgctttagttataacggcaatggccgttggggttggcctaggtatgccattaacggacattgcaaccagtgttcaaaacgggattggcggtcaacttggtgagctctcaattgtctttggctttggtgccatgatggggcggttagttgccgacgctggtggcgcgtttagaatcgcgcataccttaatcgatatgttcggtaaaaaagacttcaaattgcaattatgttggcttcgttcatcattgggattgccttattctttgaagttgggatggtcttgttagtaccaatcgttttcgcgattgcaatcgaagtaagtgtgtcaattttgtaccttggaattccgatggctgcagcactttctgtcacacatgggttcttgccaccccatccagcaccaacagcaattacctcagctttaggggcaaatgctggtcacgtattgttatatggggtcttaattgcgatcccttcagtgattattgccggtccattattcactaagattgcaaaacgcctagtaccagatgcgttcgcgcgccaaggtaatctgacggcacttgggcctcagaaaacctttaaattagacgaaacaccggggtttggaattagtgtcataacctcattattcccagtcattttgatggctgtcaccacgatttatcaaatggcctttaacggcgggaaattacctaaaaatccaacgatgctggattcaatcgtcggttttatcgggacaccagccattgcaatgaccatttcattgatggttgcgatgtatacgatgggttgggcgcgtcggattaaaaccctagcgattatgaagacgattgaagaagccgttaaatcaatcgcgatgtcactcctagtcattggtgggggtggtgcgtttaaacaaatcctcatcgacggtggggttggcgatagtgtcactaaattattcgcaaatgccaatttatcaccactattattaggttggttaatcgcagttgtcttacgggtggcattgggttcagcaactgttgcgtcattgacggcggcaggcttggtcttaccactaatgcaatcagccggtgtgaaccctgcactgatggtcctttcaattggagccggcagtttagcggcttcccacgtgaatgatgccgggttctggatgttcaaggaatactttgatttaagtgtcaaagaaacccttgcaacttggacagttttggaaacattgatttcgattgttgggttaattggcgttttactattaagtttagtcgtctaaataaaagttaaatgacgttggctgttaaagacagtcaacgtcatttttaatagcacttaaggtgggcaattatttgtaatcggttacctaaaaaaacgctgagaaacagcttttttttaatcttgttcagggacaacatcaaagagatatgatagaatgggtaaggattaatttgaacactggagacgatcagagttaggtcatcctaaaatcaaagtcattgaatcctaatagttgaacgactcaatcgaagagaaagaggtacttatatggataagaagcagcgagaagattcacaaaagggtgaacttaatcaacaaaagcatgagaaattcatacactatgctgatggcacgagtcttgaagaaattaataacacggttgcgattcccaagaacgctggtttttggcggacgttgatggcctttatgggacctggtgcgttagtggccgttggttatatggatccagggaactggatcacgtcaatcgccggtggtgcgcaatacgcatacaccttgatcagtgtgatcctagtatcaaacttaattgcgatgttattacaagcaatggcagcgcgtttaggaattgtgaccggaatggatttagcgcagatgacgcgggccaaaaccggtaaaaagatggggattttcctctggattgtcaccgaattagcaattatggcgaccgacatcgccgaaattattggttccgcaattgcgttagaactgattttcaacatcccattgctctggggtgtcttaattaccgcatttgacgtcttgctattattactattaatgaaacttggtttccggaagatcgaagcgattgtcgcaaccttggtggccgttattttattcgttttcttatacgaagtgattctagcgcaaccaaatatgggcgacgtaatgcgcggatttgtaccaagtacacggattgttaccaaccagaagatgctattcttggcattagggattgtcggggcaactgttatgccgcataatctctacttgcattcgtcaatcgcacaagcacgtcaatatgaccgtgacgattacgccgaaaagaagaaagcaatcaagtttacagtcattgattcaaacattcaattatcagtcgcatttatcgttaactgtttactcttagttttaggggcagcaatgttctttggaactaacagtgatttaggacgattcgttgacttattcaatgctttacaaaacaaagaaattgttgggagcattgctagcccaatgttgagtttactctttgccgttgctttattagcttctggtcaaaattcaaccatcacagggacactttcaggacaaatcgtcatggaaggtttcgttcgcatgaagattccattgtgggcacgacgggtgattacccgtgggttatcaatcttacctgttattattttcacggtttactaccatgggaacgaagcacaagttgaaaacctcttgatttactcacaagtcttcttgagtgttgcattgccagtctcgatgattccattgacaatgttcacgagtgatgaaaaaatcatgggcccattcgttaaccgcccttgggtgaaatatacggcatggtttgtcacaattgtgttgacgcttttaaatatctatttgattctacaaacaatcggcctagttggctaatgaataggtgctcgttaatccgtaaattgatatggattgacgagcgctttttttgttcggtatgctagactagagataaggtattattttggagggattttattgtttgaagtaacgagtgtgcatatcattattcgactgctactggcaaccttaattgctgggattatcggatctgatcgggaatataagaaccgcccagccggaatgcggacacacattctggtctgcattggtgcgtgtgtgattgcgatgattcagcaggaaatcgcagcgcaaaacgttcaatttgcattagcgcatagtgcgattagtaccactattcgttctgatcaagcgcggctgattgcacaagttgtcagtgggattggttttttaggagctggaacgattattgtcacccgccacaagattcaaggattgacgacggcggcctcactttgggctactgcgggattaggacttgcaattgggatgggctactatcaaattgcggtgatcagtgcggtctttgtcattttcgtgattgtcttcttgaaaaagattattcacatcaatacgttgaaaaaaatcgaaattaagtataagcataaattggaaaccaaggagtttattcagagctattttgaacaacatcagattcaaattcgcgatgtgaacttctcagtaacgcaaaacgaacgtgatacgatttacactaacgtctatcgcatcgaaattccccgggaaatgcaatatgcagaaattgtggaagatatctcgatgaataagaacatcatgacgattcgaatggtcagtgtctaaaagagtgcgcaagcaggcgtttatatttcgagtattaactggatttgtctgcaatcgccgatgcgacaagtttggttaagcacaggaatatgcctgctggagcacgtttaaaaaaagtgtgctgtctcaatcgggaaatacatttacgaaaaaagaagccccctgataaaaaagtttatcagggggcttctttttatttcagtctaattaaacgcaatttgtctgtctcttggtaagattaagttgagaataattgcggcaagcgcacaaatcgaaattggtgattcaagtaagtattggatcatttgaggcgttgctttcaccaatgattgtggcatgatgatgatggcgatacatagaatgattggaattccgatgatgtacatatcacgttcttgggtgtgtagtgtgcgaataacatttaacccgttgagcatgatagttgaacaaatgatggcgaaaatcccaccaataactggggctggaatcgctgataagaaggccgctaatttattaaagaagccgaagatgataaaccaaatcccggcagaaacgaatacttttttactagcaacaccggtgattgaaataatgccggcgttagttgcataccctgtaactggtgagccgcctaagagtgcagcgattaaacagctaattccttcaccgataatcccgtgattccattgtttcttactgatgggcgaatccgtaacggcactcattgcaaaccaagtcccggtcgtttcggtcattaaaacggcgtagataatgacgaaggtcatgattgctgtcatcgaaaagtgcataccatagtggaatgcggtgaaacttggcaagctaaaccaactcgcttcgttcacactttgccagtcaaatttaccaagcatggttgctaaaacagttccgcctaataaggcgatgatgatggaactaactttgaagagtttttgtaatttagggaagtagatacctagcgaaacacaaagaattagaatggcgacggtcacaacagccaggagtaagttctcattgatattgccctgtgctttgaaaatgttatcacctaaagcagatggcatcagtgaaagaccaacgatggtgatgattgtgccaccgacgacttgggggactaagctgttaataattttttggaagaggccggtgacgccgagaagaattaacagaattgaaccgacaattgaagcgccaatcaccgttgccatcccgccgtctttagcaccactagcaaagtaaatcccggcgattgccccaattggaacaaatgaagggccttgggaaacaggcattttcataaaaaatttggtttgaagaatcgtaccaatcccggcagcaaggaatgtcgcttgaattaagccggcttttgcatcaagacccatcgccaataaaccggcaatgataacggggggaacgtagacatccattgctaaaacgtgttgtagtcctaagaagccagcttcttgattcgaaatcggctcgtcaggaccgaccattaatttttgagattgttcattcataccagttgtgctccttttcgtggaccagtttaccttgaacgtagacggccttaatttggtgtttggtgtggcggaataaaagttgttcgagttgttcatctggtgtaagacttgcaaagcgtggtggcgcttgaacgatttggaaatcagcaagcaatcccgattcaatggcaccagcttgaatgccaagactagttgcaccaccgacggttgccatataaaaagcttgtttagcactgatccgactgttcgcaacaccgcgttggtcagccgcaatggtggcgtcaaccccgtcttgtcgaatttgggaggccgttacggcttgttgcaaattggcatataagctaggggtataaccaccggcgatatcactgccaagcccaattttaatgccttgattaagtaactcgtgtgcggggagaatcccgttaccaaaataggcatttgagatagggcagtgcgcaatcgctgcttgttcggttttaatgatactttggtcagtagttgtcagttgtgttgcatgtgctaataccgaatgttgattcaataatccgaatgattgcaacatctcagagtctgtatggccgtaacgttcgcgtacataatcgtgttcccagtcgctttcgctgcagtgtgtctgaacggtgatgtgttgggactgtgcaagttgaccgagttgctgaagtgtttcagttgtgcaactagggatgaagcggggggtaatgacgggttgaatgaacccattacgataggtatcttgaattgcttgaacaaaagtttgtgttttattaatggcttcttcaggagaagcatcacgataatagtctggtgtttgatctggattatccatcgcaacagttccgatgaaagcccgttgccctgcttgggaacaaatttctgcgagtcgtagattcgcagaattgtgaattgttccgaaatatagggcggttgttgtgccgttagcgagcatttcggtcactaagtcttgatacacaggtgtggcgaaatctaaatcggcgtagcgcgcttcaagaggaaaggtataatgattgagccaatcagctaaagggcgatcaagggcaattccagcttgtggccattgtggcgcatgattgtgtagatcgataaagcctggtaacaagaagtgtccgggagcgagtgtgattaagtggtcatgttggcgcgcagctgataatcgctcagagtattctgacgccgtttgatgaataatgtttgtgatttgaccattatcactgatttctatcagtgaatattcgtgaaatgaactataatttggtgaatttgcagaaaaataacttgcttttagtgtgattggcaaacttttaaacctctccttctagatggtgtgttgtaagtatatcacataccataatgcttttaaactttaaaatcgttcgccttttgattcatttctaagggatgctttcagaaaacgacacgtgagcaaaaaggtaccctaaaaaatagcagactgctagaatgaacttaaataagctagttgaaaggatgaatcacatgagtttagcagatgaatttgtagaacggcgttttattgtctttcaatgctataagtgccaacatccagcgatggaaatcacgacgaagacagcactagaagataattcagatggctctaccaagtttcaaattgaaacaacttgcccacggtgtcaagcaaccgatcaatttgttatcaataacggtcaagaaggggaaattagcgcgagtgtcaatagtggcaaagtcgctaaggttgccaacattaaataaggcaatcgacgttcgctaaaagtgaacgtctttttttgtggcgtaaattgtatataattatgaatacatgaataaaaaggctggaaacggttgatttattcaaatataattgacattatgccctttgaattgtatatttattctacttaatacaattataaaggacttattgaaatggcgaaatcaaaaaaaattaacgttcaaggtctcgtattgatgatttttgggtcaatcttcggctttgcgaataccacaattgctttctacttaatgggctatgccagcattatttggtatatcttagcggcaattttctttttcttaccaacttcattaatgtttgctgaatttggttcttctttgaaagaatcacgcgggggcatctattcttggttagaagcatccattggtaaaaaggcggctttcatcgggacgttcatctggttagcgtcatggattgtctggatggtgtcaacagctgctaaagtgtgggtgccgttttcaacgttcctccaaggttcagatcaaacagcaacctggcatttattagggatgaatggcactcaagtggtcggtgtcttaggaattctttggattttattattaactttcctatcaagtcgtgggattgataagattcaaaagtttgcgtcattcagtgggatggccgttgcctttttattcgccgcattcttagtgattagtgtggcgatttggtttaaaacgggttttcatttggcagaaccgattcatgggacgacgacctttgttaagagtccgatgagtagctatcaaacaccaattgggatgttatcatttgttgtcttctcaatctttgcttacgcggggatggaagccatgggcggtgttaccgatagtatggatcagcctgaaaagactttccctaaagggttaatgattgcgacagtcttcattacattaatctacgcggttgcaatctttatgtggggcatctcaacgaactggcaacaagtcttgagcgggaataaagctaacatgggcaatattacttatgttcttatgcaaaacttgggttatcaattcggccatgcctttgggatgacgacacccgttgcgatgacgattggaacaacctttgctcggattaccggtttaatcatgtttatcagttacttaggcgcatttgccgtcttgatttattcaccattaaagtcatttgtactcgggacacctaaagcactctggccgaacggctttgcagaagttaacaagcatggcatgcctgaaaaagcaatgtgggcgcaagcattattagtctgcattttaatcgcggttatttcatttggtggtaaagctgccggtgacttctataatgtcttgactttgatgtctaacgtttcaacatcgttgccatacctctttttagtgactgcctttccatatttcaaggcacgcaaagatttggaacggccttacgaattctttaaatcaccagttgctgttaaggcggtgacgattgtggtcgacttagtccttgtcttcggaattgcctttacgattattcaaccgatgttagaaggtcaatatttagatgccttctggatggtcattggtccgattgtctttacgattatggcccttgctttgtatcatcgctatcaacgaaaagcagtacatggctaaattttttaaaagcgttgaccgatttggtcaacgctttttttgatggcctaattaagggcttgtgaattttaaaagggattaattctcatttaattttaatgtacaaaggaaaatagttgcattttcagattggttccgttttagaactaatctgatttttaaagactaacataaagccccatctagcgattttttaatttttaaagaaagttggttacctaactatcacattagaataaaatgagaataaaagtggacggtgtgcaactttcacaataaacctgtatactttttagatatagttttcagaaaatgaaatcaaagggggattctatgactgtcaaattacaagtcaaaaatctaacaaaaatatttggtaagcgcgtgccgcgtgccaaagaattactgaaacaaggaaaatcaaaagcagcgattctaaaggaaacaggtgcgacaatcggtgtcgaccgggctaacttcgaagtagaatctggcgagatttttgtcattatgggactatctgggagtggtaaatcaacattggttcggatgatcaaccggttgattgagcctactgaaggtagtgtattaatcgatggcgaggatttaatgcagattgataagaaggcattacgtgaagtccggcgtaaaaagatgagcatggtattccaaaattttgggctctttccaaatcgaacgattcttgaaaatacagactatgggcttgaaattcaaggcattgataaggcgacacgggaacaaaaagcgaatgaagcactcgatttagttggtttaaatggttatggcgatcagtatccgacacaattatctggtgggatgcaacaacgggttggtttagcgcgtgcattagcgaatgatgctgagattttattaatggacgaagctttttctgcgcttgatccattgaatcgttctgacatgcaagaccaactactcgacttgcaagaaacgatgcacaaaacaattatctttattagtcatgatttaaatgaagcgctcaaaatcggcgaccacatcatgatcatgaaggatggggaaatcgttcaaaccgggacaccggaagatatcttgacacggcctgctgacgagtatgtagagaaattcatcgaaaacgttgatcgtagtaaagtttacacggccggcaacgttatgattcgcccaacgactgttaatattgaaaaagatggccctcgtttggccttaaaacgaatgcgtgaaaatgaagtttctaatgcttacgttgtcaacagtaaacgtgagttagttgggattattgatgcgcgtgatgtacttgagttagtccgcaaagaaagtcgtgatttgcaatcaatcgtgaatactgaagttccaacaaccgatgaagagacaccaattgctgatatcttagatgatatttcgcaaacgggcattccgtttgctgtcttaaatgataagcaacaattacgtgggattattattcgcggggccgtcttaggggcacttgcaggaaacgaggtgaaccattttgcttaatttaatgacgattgctaaattaccaattgccaattggatggatcactttgtcgattggctgacacaatttactggcttttttaatggtttaacgaattttattggcggaattatcaacgctttccaatgggtgtttgatttaatccccatctggttattcatcgtgattatcgctggcgtcacttatttagcgaatcgcgacaccaaaaaatggggtttaattatctttgaagtcctcggcctactcttgatttggaaccttgatttctggcgggatatgacgcaaacgttaacgttagtgttaacctcgagtctgatttccctcgtaattggggtgccacttggaatttggatggccaaaagcgatattgcccaggcaatatttaaacccatcttagatttcatgcagacaatgccggcatttgtttacttaattccagccgttgccttctttggtatcgggatggtcccgggcgttttcgcatcagtgatttttgccatgccaccaacggttcgtatgacaaaccttgggattcgccaagtgccaaccgaattgatcgaagcctctgattcatatggctcaactgaatggcaaaagttaattaaggttcaattaccattggcgaaatcgaccttaatggctggggttaaccaaagtatgatgttggccttatcaatggtcgtgattgcgtcaatgattggagcaatgggcttaggaacacgagtttactttgctgttggccggaacgatgctgggggcggttttgcagccggcttggcaatcgtaatcttagcgattattattgatcgtttaacccaagctttgaaccggcaacgtaaacattaaggagggattcagtgattaagaagaataaattaatagcttttttcaccttagtggggctcgtcacacttctaacggcctgcagttcgcaaactaagccgtacgctaccgatgagaaattaggcggtcaaattaattacacgattaccggaattgacgcgggtgctgggattatggcatccacacaaactgcaattaacaagtatcatttgaatgatcagaactggcagttgcaaaccagctcaactgcggcaatgaccagtacgttagacaaagcgattgcggataaacgcccaatcgtcattactggttggcaaccacattggatgtttactaaatatccaatcaagtttttaaaagaccccaaaaatgtttttggtcaagctgaacacattaatacggttgttcgtaaggggctaaagaaggatatgccagaagcatataccatcttagatcgattccattggacgccaaaggaaatgtcgaccgtaatgcttaaagtcaatgacggtgttgaacctgaaaaggcggcgcgcgattggattcaagacaatccagaaaaagttgctgagtggactaagggtgttaaaaaggttcatggcacgaaaattaagttaacctatgtggcttgggattcagaaatcgcgtcaactaacgtggtggctgaagttttacgtcaacaaggttatcaaccaacgattcaagctatggaaattcaaccgatgtgggcgtcagtcgcaactaaagcagccgatgcacaagtttccgcatggttaccgaagacctctggtttatactacaaggattacaaaggtcagattgaagacttaggtccgaacttagagggtgctaaggtcggtttagctgtaccgaagtatatgacgaatattaattcgattgaagatttgaaaacaaaatagaatcaaacagcgtatgcgatctgttcagatagaacatggttagatgatcaaatttcggctgttgaaagagtcggttagggcaaaagttacttttgttccaaccgactctttttttatttgttagacattctctgttagaataggactattgaatgttatcggaggcggaatagatgtctgttaaggcgtttttagattttatcgaattacgcactaaagttggtagcgtgattccctttatggctgggttcttttttacgttgtattatttccaccaaattgatccgatcaataccgtgttgtacttctgtgcattggtgttaattgatgtcttcacaacgggatggaataattacaacgactttcacctcgctaaaaatgaaacgctccagcaatcaaccagtgcattaggacgacaagatattgcccctaaggttgctttacgctggttgatcggctttataagtacggcaaccgttctggggctgattctggtctggcgcacaaatttaattgtgttagccatcagtgttctgttcatcttaatcgggattttatatacttacggcccattcccaatttcacgattaccactgggtgagttgttatcgagtctggtattagggttcggtaatttctttttgacggtgtatgtcaacgttccggcggatcagttggtcgatttgcgctttgatgggccgttaatgttattccaactgaattggctgaatgtgattttggtgtttgtggcgagtttaccaactgtcttcctgattgctaatttgatgttaatgaacaatatttgtgattacacagtcgatttagagaatgggcggcacacattaatcagttacattggtcaaaagcgcggcattcaactttatcaacttagtgcgtatagttgttacgtggtgattattgttgggattggcctgaaattatatccatggccagcagcgctagcttttgcgagtggcccaactttgttacgtaatgggtttgcattacagaagagtcaggaaaaacgcgttgtatttggtacagcggttcagaatctaattgtctttaacggtttttggctagtgggaatgttgattggcctctatctttaaatgaaaagtcactgcggtggcttttttatttcaaaaaaagtattgattgtatatacaattttgattataccgtgattattaaaacgcttacatgtggagatgagagttatgacatatgcaatgattgggacttggcgaatggcctttgaagggattcaaaaagcgatggctgatttaaaaaatggtgggcaaagtacggatgcaattaaaaccgctatcaaaaaagtggaagattaccccttctttaaatcggtcagttacggtggtttgccaaatgcgcaaggcttagtggagatggatgcggcattcatggatggcaacacttttgcaattggtgctgttgcaggaattagtgatgtgaagaacccaatctcagttgcgcgtcaattaagtgacgatcattttaatagtttcttggttggtgcgggagcgtcacaatatgcgatgtttaacggttttgaaagccgtaatatgttgaccgaacgcgcacacaaaatctggatgcaacgaattaaagaaattaacgaaaaaaatcttagcccatatgatggtcacgatacagttggcatggttagtttggatcaagctgccggtatggcagcggggacgtcaacttctggattatttatgaaaaaaccagggcggactggtgattctgcattatctggcagtggcttttacgtggatagcgaaatcggtggcgcaaccgctactgggttaggcgaagatttaatgaagggctgtctttcatatgagattgtgcgcctgatggggaccggtttatcaccacaagcagcgtgtgatcaagcagtctatccgtttgttgagaaattaaaaaaacgctacggcaaagctggcgagttttcgttggttgccttaaataatcaaggtgaatggggcgtggcgacgaacgttgagtttacgtttgcagctggcaatcaagatgcggcaccacaaatttttatggctaatccagggccaagtcaaacgatggtgatcgaacccatttcagcagaatggcttgaagcctacgcgaaacggattaaagcaccagttgaatagaggaagtggttggaatggttaagtatctatacgttgaaattgcagaagccttacgagatgacattcaaaaaggggtctatgggatccatcagaaattaccatcggaaacggatttagccaatcaattttcaacgacgcggctaacaattcgcaaagcaatcgatctattggttaaacaacatgtcgtggtacgcgatcgaaatcgtggcacctatgtacttgcaacacaaagtaaaatttcgagtggttcatctggtttagttggttttaccgaagcagccaaacagtttcaattggatgtcagcacgcgggtgttagatttacgccggacaatcgtttatccggactatgtggcctccaagttagatttagcaccacaggagccagtttggcagattgaacgcttgcgaatggcagacggtgaagcgatgacccacgaacaaatctatctgaaacaaaaaattctaccagaattaacggcccatgaggcacaagggtcactctaccgcttgattgagcaaacaatcccaatcgggtatgccaatcaagaactcgaagcagtcgtattggaaaaaggcttaagtgacttacttgagacctctccagggcaacccgcttttctagcccacacggttgcgtattcaatggacggttatccaattctttatgataactcgcattatcgtgctgataaatacacgttccataacatcttgcaacgtgaacattaaaaggagggttttaaatgaaagtaattgtcttgttggatcaaatccaagctggattaggtggtaaggaaaaaggggatacccctttaggtggaaaaaaattagcgatgggtgctgcggatacgctcgataaggcattaaaaaaaatggactctgaaattatcgggaccttttattgcggaactgattattatcaggcgaacaaagccgaagtgaatcggaaagttgcgaagatgagtgagaaaatgggtgcagacgttgtgattgcgggaccgacctatgattatcgggacttttcgacgatggcgtgtgaattagcagccactattcaaaaagaaacaacaattccggttgttgggctgaccgcgatcgaaaagaatgccgatttaattcaacagtatcaaggtcaaataacgattgtgaagatgccaaaaaagggtggtactggtctttcggattcaatcgaccacgcattgcagttatgcaaaatgaaggttaaaggcgctgattttactgattttattaaccaatattgttattaaaaggaggcaaaaccgatgcaaaagaaactcgaacagattttgatgccggttgcgattaaactggggaataatgttgtactccgatcattgcgagatggtttcttaatcattacgccattgattatcgtgacatcgattttcttactgattgggaattttccaattcctggttggactgaattttggagtgggattttagggccgcactggacagaatggtttagtgctgtttctaatttagtgtttagttttacagggttgcttgcttgttttgggatatcctatgcctatggtaaaaaccgagggttacaagcgattcataccagtgcaattgctattatttcattcttaattttgacaccgactgttgtcaccgttggtaaaaaatcaatcggtgccattcaaacaatgtatttgggacctaacgggattttcctagggatttttatcgcattagtcagtgttgaaatttaccgttttgcgattaaacgcaactggcgaattaagatgccagatggtgtgccacctgcagttagtgaatcattcgatgccttactaccggctggcttagtggtattagttttcttcttaattcgaattggttttagcctttcgagtttcgaaacggcctacaatttcatctacacgttactgcaacaaccgttaaaaggtgccggcaactcattgccatctgtattgctttataacttcatcgcaatgttgctctggtgttttgggattaatggtccaactatcaccaacagtgtgtggtcaccaattttcttcgttctgacgcaagataacttaacagcattccagaatcatacgcagttaccacatattttcacccaacaatttattgacatcttcaccacatacggtggcggtgggagtaccccctcactcttaatcgtcatgttaatcgtctgcaagtcaaaacgcgtcaaagaattgggtaagttggcaattgtccccggtattttcgggattaacgaaccgattatcttcggtttgccagtcgttttaaacccaattattgcaattccattcattatcgtaccggttttaaatacattgatttcagggattgtattccaactcggatgggtaccgtatacaaatggcgttatgttgccatggacaacaccaccgattatttctgggtggctttcaactgggagttggacagggtcagtcctccaattatttgaattagtgcttggaattttaatttactatccatttatcatgatgattgatcggcagtatttggcggaagaagccgaagcggctggcttagacgatgttgatattaattttgacgaaatttaatagaaagaagccattcttgtgaaaccgattagagcagattttaaggcattatttgaagcacatgctgatgagttcttagcggacttgcgggaagtgttacgcgtgccgagtgtgtgtggagcgcaaacgtttgaagcgccgtttggaattggtccgaaacgcgcattggaaacagtgttggcgattgctgatcgaatgggctttaggacggggcaagtcggcaattgtgttggctgggcagaatatggaccagacgaaacgcaagcgccaacttattttgggattcttggtcatttagatgtcgtggatgttgaagatgattggcattatccaccatttgaactgactcaggtagataatatgctgtatgggcgtggtgttttggataataagggaccacttttatcgacattatttgccctgtatctgattaagacgcaaaagataacatttaaacaacgcgtccgaattatttttggcactgatgaggaatctgggagtcaggatatgccaatttatttggcggaacattccgcaccatatgccggattcacaccagattgtaaatttccagccgtctacggcgaacggggcttgttagatgtccagttagcgttaccgattacggacggctctgagcaacaaattacggcgattgaaggacggttcgctaaaagttatctgccagatcatgcacagctgattttggccgatggcacggttaaaacttatcacggcaaaaaggcacctagcaatgcccccgaaatggcggataatgtgttaccgaagttagttgccgatgcaagtcaactcactggtcaaacgggtcaattttatcaatgggtagccgctaaaatcgggacgcagtcaactggggaaaactttgggattaattatcaagatgaagcatcaggagcattgcaacttgctttttatggggtatcgattgaagcccaacagttaagtgtgcatctgacatgtcgttacccaatcccagtgacggaagatcagttgttaactgggattaaagctgccatgttgccggggatgacgttgacggttaaacggcgttatccatcgcaagttactgatccaacattgccatttattcaacaaccctctgcgatttatgcggcagatactggtttggatggcacaccggtcacaacaacgtgcgtgacttatgcgcgcgcgttaccgaacatcatcgcgtttggcccatcatttccaggtcaaaaagggattgcccataaaggggatgaatggcttcaattcagtgactggcaaatgatgatgcagatttattatgatagcttgctcgcagtcggtactggaacataaaaaagcgtgtgccataagtcgggataccctgaggattagccggaaggggatgacttataagaacacgtttagacgattaaagttctaatatcaaaaaaggggctgagacaaaatttacttttgtctcagccccttttactgtttagcgacttgctaatgcgcccattggatcccatggtgcgagaacggttgggtgatcgtattcttctgtttcaatgcgtttcatttcatccgttaagaagcgtttgttgatcacgatttgataaacaaattcgtcaaaccaactatcactcatgacgaagtaacctttcgtcccaactttgtcaccccatgagttttcaaccttccatttggttggttgaccatcgacgaggtcgacaccggtgatgaccatcgcatgggtcatgagactttcaccgtaatcaaggcgttcgcctttagaaattgaaagatccatgccgagcatggcatctttttgataaacttcagtgtccatgatgccgagtttgcgatcagatgattggcctacatcgctaccgaaccaaacggattcacctgcttgtagttgtttaatcgcgagttgtttgaaggtgtcgatgtcgaggtttaaatgccgcacttcacggccaccgaccacattgcccaacatttcaacgctgtataagtggttgtatggtttgtcggcagttggtgagttaatcaatgaaacgtaattttcgaggtcccagccaacgtatttttgatagaacgtttgcggtgtgaggcctttttcgatgtgatagttgtgatcatcatcgcggtattcaaagtcgaattcaacgggtggttcgcccaatgcataaacgagcatccggtaaacttcggttaacatcgcgtcttttttagcttggatgtcggcttcgctaacaccgtcggctactaattggcgtaatgtaacggcatctttacggagtttaaggttcaaaacgccgttgagttcgcttgatttttcactattatatgtttcgggcatgactgacttaggtacaatcccgtatttttcgatgagtgcgcagagcatgtcccattggccgccatcttgttggggcgttgtcattaagaagtcgactttgcggtcgccaattggttggctggcagtcttcaagacgttttcgtagaagtagtttgatttttcgaatttgtcccagaagttggtgtagttttgggacaattcgaaatccttaattttgaattggtcttggaggctgtggcgcattgtatttaacgcggcgaacatccagcaacgaccagattgcttttgattggaaacggcaccggtatctaagtcaattgaaaaaacgggggccattttggcttttgaatcggtattagcactcgtggctaaaaagccgttgttcataatggcatttttaattgtgttggattgtggtgttgccttgaaatcggctttgaattgttgaatatcttttgctgtaatgggttgaaccatgtggaaaacctcctctaaaatttggtgggttaaattaaattacccggtttgaatggcattatttttttgaaacgtgctttcatcaacaacttcttccgccttacctcacttgccaaatcggcgactgcattgccaattcgtcaagtgctgtaagtgctcagaagtaacccgttgatggcgcactctgatttgaaacgtgctccgtaagccatatccttccggttaaccctgaacgtcaaacgattgctggcgcaatccttcgccgttctgtgttaatcctcaggataaactcggcttactacgcactctattgcagtgcgtcccatgggtctagcttaattggggtttttgtgagtgcggcttgttcttcttttgtaaggtacgcttttttgacaattacctcgtaaacgtagtcgtcaaaccaagcgtcgctcatactgaagtaaccttttgtaccgactttggcactccatgtgttttcgactttccatttcgttggttggtcgtttacgaggtcgacaccggtgagggtcatcgcgtgggaaacaacgccttgtcggtagtcaagtcgttggtcttttggcatcgtcaaatcgaaaccaaagagtccagaatagtcgtaaaggttgcgatcaagccagcctttttgtcggtccatatccgcgagcacgtcattgccaaaccaaattgtttcaccgttttgtaaggattggatagccagtgcttttaaacgttcagggggtaagtttaagaggcgcattgggtgaccttcgactaccgtgttttgcgattctaaactgtagagttggttgtattgtttacttgtttgggggctgctgacaacggtgatgtagtcgtcaaagttgcgattgagatatttttgatagaaactttgcggggttaaaccgcggtcttcatggtaattttggtcgtcatcgcgataggtgaagtcaaacgtttcgactggttcgccgaatgcgtaaacacatagccgatagatttcacttaagaaaccagtccgcgtttcactgatggttgtttcgctagcgttgtcagcaacaagttgccgtaattgaatcgcatctttgcgcagtttcaaattaagagtgctgttgaattcagtggttaagtcactgttataagtttcgggcatgaccgacttgggcacagcaccgtatttttgaatcagtgccactgcgttgtcccattggccaccgtcaaaatcgggaccagcgagggtgaaggcgacttcgcgatccgtaatcggcttgtcggcagttgctaaaatcttttcataaaagaggttcgccttttcgatgcgatcccagaaagatagataattttgggagagttcgaaattcttaacgtgatatttctgttcgaaatcgtggcgtaatgtatttagagtggcaaataaccagcaccgcccactctttttttgaaagctgacatcaccagtggggaggtcgattgagtaggttggatcaagggtgacggcagcatcggggcgttgactaacggcgttaatgccattcgtcatcacagcatttttgagcgtcgttgcttgtggcacgccagctaaagcggtccgcatcttgattaaattattatgtgtaatttctttggtcatctaatcactccttaatttttgaattagtttaattctagttgattagatgggagatgtaaaccgaataacggggataaagctaaaagaatggtgattgataaatgtgaaagaaaacgatttatatgagagcacgggacacaaaaaaacgaaccgctgagggttcgtttggaaacgtgctttttaaagctgacgcttgcgcttagctacgtattgcaaacgaccgattttgtcggtcatttaaaacactgtgctagtgcacagtgtcaaatctcctttaaacgcacgctttattttgctgttaaaatcttcacgccatcaggtgcgccaaccacgacttggtcgacgatgtctaggaatagaccatgttcaacaacgccgacttgttcactgagccatgatgccagtaggtggggatgttggacttggttgaggtgtaaatcgatgacgtagtttttagaatcagttaagacgtgttggccgtctgcagtcatccggaattctggatttaagccttctttagccattttgttgaacacttgttggctgccaaatggaatcacttcaactggtagtgggaagcgaccgattgtatcgaccactttttcttgatcgacaatccaaatgttgcgggttgaagtagttgcgactaatttttcgaataagtgcgcagcaccgccgcctttaatcccttggaagttggcatcgacttcatcggcaccatcgatggttaaatcaatgtggtcgacatcgttgagtgctttgaccggaatcccaagtgatttggcttgttcttcagtacgaattgaggtgcagacacatgttaagttgaggtgttctgcttgtacccgttttgcgagggcttccaccatgtaaactactgttgaacctgttccgagtcctaaaatcatgttatcttcgacaaaatccactgagcgttcagctgccatctttttcattgcattcttatccatcaagacaccccttttgtattaataaatctattatacgaaaaaaacgctttaattgggcgctttttgttaaatttttaattaaatcagccttaggcattattcacagcctccgcggtttcatggtatgatacagtggtacaaaaagaacccaaatgggcgataatattaggagttttaggaatgaaaaaacgcggctttgaaattgtgaccaaataccaagaggcgggattgagtttaccggtgcgttcaacagcgcattcggcgggctacgactttgcttgtgcggaggacttcgtgttgccatcaatctggcattacaactttgtgcgtttgttccgaatgattcgaaatggcaaaccgttagtggatgacgattttgaacgtgcatcaaaaacgttgaaaccctttctagtaccgaccgggattaaggcttacatgcaagacgacgaatatttaatgatcgccaatcgttcaagtaacccactcaaaaaagggttaattttacccaacggcgtcggcattatcgatgcggattactacggcaatgatgccaacgaaggtgaaatttttatccaaatggttaacttcagtccgcgggatgttatcttgaaaaaaggtgaacgaattggacaaggcatcttcatgccatatttagtcgcagatgatgaagcgacggtaaccaccaaacgaacgggtgggtttggctcatctggtcgctaaacgttaatcgctaggtcgccgaaaattcacaaacttatgttaaaataaaactaatctcgataatgaaggagaatctttgtggctaaaattaagactcagtttgtttgccaaaattgtggctatagttccccgagattcttaggtcggtgcccgaattgtggcgcttggaaccaaatggtcgaagaacgtgaacaacctgcagctagcgcgaaatcaagttttacgatttcagggcgggcaactgaaccagaacaaattagcaccgttaatattcaaaaggaaccgcgtattaaaactgaattaaacgaactcaaccgcgtgcttggcggtggagtggtaccgggctcattgattctaattggtggggatcctgggattgggaaatcaacgttactcctacaagtttccggacaacttgaaaaggttggtaagattctttatgtttctggtgaagaaagtgcatcccagattaagatgcgggctaaccggcttgatgtgaatggcgatcaactttacttatatcctgaaacggatatgggcaatattcggcatcagattgaaacaatgaaacccgactttgtggtgattgattcaattcaaacgatgagcgaaccagaagtgacttccgcagtcggtagtgtttcacaagtgcgtcaagtcaccgctgaattgatgcgcattgcgaagacgaaccagattacgatttttgtggttgggcatgtcactaaagagggcgctattgccggtcctaagattttggagcacatggtagatactgtgttgtactttgaaggggatacgcatcatacttaccgcattcttcgctcggttaagaaccggtttggttcaaccaatgagattgggattttcgaaatgcgtgaagccggcttaaaagaagtcgcgaacccatccgagattttcctagaagaacgtttggcaggggcgacaggttcagccgtggttgtttcgatggaaggcacgcgacccatcttggtcgagttacagaccctaattaccccaacactattcgggaatgcaaagcgcacgtcttcagggttagatcataatcgagtctccttgattatggcggtgcttgaaaagcgtgctagtctcatgttatcgaaccaagatgcgtatttaaaagcaactggcggtgttaaattagatgaacctgcgattgatttggcgatggctgtttcgattgcatcaagctatcgggataaagaaattccaccaactgattgtttcgtcggtgaaatcggtctgactggtgaaattcgccgggtcaaccggattgaacaacgcgtcagtgaagctgctaaattaggctttaaacgtatttatgtaccaaagaataacttacaagggtgggacgcaccgacggatattcaagtgattggtgtgaccacgattgcagaaactttaaagaaagtattcaactaggcataagttggagcgagaggaggttgaacgatgcaacaaaaacgatttactaaaaaaagaatattaggaattgtgttcattatcttaggaggtgcgcttggaattacggcgttcccagtattttggccattagttcatttggaagacatgatgtatctcaataacggtattactaacgccattttaggggccattattttctatctattattcttggcgctggcaacaccaatgttgagagctatgcaccggcttgaaaaagccttaacgaaacaatcacctagttttattttatttgggagtgttttttcactaattggattgttattagcaaacgttgtttcgattccgctataccggatgcccatttttgcattaaatacagttgtacccattttattgatgattgctttagggtatctcggctttcgaattgggacaacgcgaatggaagaatggcgccgtttgatgcaacctaagaaacgcaatgctgatgtattagaacgtaaagtcggcgataatttccgtaagtataagattctagatacaagtgtgattattgacggccgaataaaagaaattgctaagacgggctttatcgaaggcacattgatggtgccaaactttgtcttacatgaactacaattaatttcagattccgctgataatttgaagcgggcacgtgggcgccgtggactggatatcttaaacgatattcaaaaagacgatagcttatctgttgaaatgtacgacggtgatttcgaggatttaacggaagtcgatagtaaactcgttaaattggcaaaattacttgatgggattgtcgtgacgaatgattataacttgaacaaggtctgtgaatttcaaaacgtaccggtcttcaatatcaatcaactcgccaatacgttgaagcctgcagttttacctggagaagcgatgaccgtgacggtggtgaaagccggaacagaacggcaacaaggggttgcctatcttgatgatggcacgatgatcgttgttgaagatggccaacattacttaaataaaccgctagaagtgattgtgacaagtgcgcttcaaaccgctgcggggcggatgatttttgctagaccagcgcatcaacaaaaaggcttgaaagaaaaatagccacgcagaacactttacacggtcgtcaataatctgtatcatggagaccaactaaaccgttaaaattgatgaagagaataagtagatgatgccaattgttaagagagctttcgaattgctggaagaaagccgattgccccatcgaaatgcacctctgaaatgccaagtgactttgtgacttagccgggacaccgttacctgttcaaggcatttttgcaaagaaaagtggaaccacgctcaatcggcgtcttttgttaaccaacaaaggacgctttttatttggaagagtgcgtttgaaacggtttgacttcgagcatttgcctaataccgtgagggagcgccaccggcgatcgtttgcggtatggagcaaagcacagaagtcagtttcaaaaagcacgtttagaagaagagtgcgacagcaggtggttatattttgagcattaactggatttgacgaattggcgatgcaatcgccgattgggcaaatttggttaagcgcagaaataagcctgcaagagcacgtttaagaaaggaagattcgatgttaaccgtttataataccctcacgcgtcaaaaagaagtcttcaaaccgattcaagcagaccgcgttaaaatgtatgtctgtggaccaactgtgtataactatattcatattggtaatgcgcgcagtgcgattgcctttgatacgattcgccgctatctcgaataccgtggctatcaagtcgattatgtctcaaattttaccgatgttgacgacaagatgattaaggctgcgaatgcggaacaaatcacggttccggaattagctgaacgctatatcaccgcttttaaagaagacacccaagcacttaatattgaaacagcgacactcaatccgcgggcgacagaaaacattccagaaattatcgcgttcattcaagacttaattgctaaagattatgcctatgccgttgatggcgatgtttactatcgtgctcgtaaatttaaggactatggccatctagctggtcaagatatcgatcagctcgaacaaggggccagcgaacatacagcaaccgaagaaaccctacgtaaggaagatccaatcgactttgccctttggaagtcagaaaaagggaccgatattgcttgggattcaccttggggtaaggggcgaccaggctggcatatcgaatgttcagtcatgtcgaccaaatatttaggcgacacgattgatattcatggcggtggccaagatttagagttcccacatcatgaaaatgaaattgctcaaagtgaagcgaagactggtaaacatttcgtcaactattggttgcacaatggctttgtgacagtcggggatgatgatcaaaaaatgagtaagtctcttggcaacttcgtgacggtgcatgatttgattcaagaagttaatccacaagcattacgtttcttgatgagtagcacgcaatatcgccgaccaattcgctacagtgaatcattattagctgaagcgcaaacgaacctggatcgtttaaaaacgaccctcgataacttagcgttccgccaaacgactgctgaagcgggtgcagacgcagacattgccgcacaagcggcaagcttggaagacgcctttgtgacagcgatggatgatgattttaacgtgcaaaacgggttaacagaattgtatgaactcgctaagcttagtaatcaatacctggaacgggctaccgtccaagctggtacgttagtggatttaactacccgtctaacgcgcttgttagccatttttggtgttgagtttaaggcggcccaactgttggacgcagaggtcgaaagcttgattgaagaacgcaaagatgcacgggcagcaaaggattttgcccgcagcgatgcgattcgcgatcaattgaaagaacaagggattattttggaagatacaccacaaggaatgagatggagacgcgcatgaaaaatgctttacaactaaacgggattgcgttggcatatatgggcgattcagcctacgaagtgtatgtccgcgcccatttgctagaactcggtttaaccaaaccaacgcgcttgcaacaagtggcgacacattatgtgtcggctaaagcgcaagctgctttgattggtttgatgatcgatgataattatttaacagaagaagaaatgaatatttttaaacgcggtagaaatgccaaaagttatacgaaagccaagaatacgagtgtttcgacttatcggacctcaacgggctttgaagcagtttttggctatctatacttaactgaacaacaagagcgcgtcgctgaattagcccactggtgtattcaacaagtcgacgctgggaggacccatgagaaaaaataataaccaaccattcaaacaaaagaacaacgaattcaatagtcgtcggacggccaataattcggcaaagccaacgcgccgtccagctaacaagaaaccagcagcacccgtcgaagaagcagttgttgaagaacaaactgatttcgtcatcggaaaacacgcttctttagaaacattgaagaccagtgatgcgaagaaaatcaataaaattttcttacaagatggcttgaaggctgactttgtccacgatgttgtgaaattagcgaaagaaaaacgtctaatcattcaaaatgtgcctaaaaataagttggacttattgagtgaccgtcaaaatcaccaagggattatcttagcaatcgcaccgtttgaatatgcgagtgttgatgatattttcgctaaggccaaagcccgagaagaagaaccgtttatcttaatcttggataacttggaagatccccacaacttgggttcaatcatgcggacagctgatgcggttggtgtgcatgggattattattcctaagcatcgtgcggtggggttaacatcaacagttgctaagacatcgactggtgcgatcgaacatatcctagtggcgcgtgtcacgaacttaacacaagaaattaagaaattgaaggaccgtggtctttggatttttggcaccgatatggctggtaccgactatcgtaagtgggatgctaaaggaccaatcggcttaatcattggtaatgaaggcaaggggctttcaccaattgttaaaaaagaagttgatcaaacgttgacgattccaatggtcggtcatgtgcaaagtttaaatgcgagtgtcgctgcgggggttttaatgtatcaggcttataatagccgtcaacctttggtatagcagatgaaaaaacagatcttaattgcagatggttataatatcattgggaactggcccgagctgaataagttgaaacaaaatgatcatctcgcggatgcgcgtgatcgcttattgcagatattatcagaatatcgcaagtttcgtgagattgaagtcatcttagtatttgatgcaatgtatgtgccagggattaaacaaagttatgtgcagtataatttggaagttgtcttcaccgatgaggatgaaacagcggacagttatatcgaaggcttagcgggtaaattaatgtcgccgattacgcaagtgacggtggtttcgagtgatcaagctgagcagtggacgattttttcacggggcgcattgcgggtgtcttcgcacgatttttatcgtgagattcgccgaacgcaccgtgaaattgaccatgatgccaagcattatcatgatcggaccttgcaacggaatatgccgtggaatccggcgcaactagatcaacttgcacaggtgcgagatgcactaagtgctgaaaaagatgattaaacaaacgttctcttaataaatgtacgataacttgttaagataaaggcgtggggttgcgtgagaggtggttcattgatggaattagcaaaacgtgatgcaaacttaattcaagcggtggttgaaaacgattctgaggcgttggatgttttatttaaagcctacctaccaatggtttatcgcacctttactccatattatattcgcttatttgatgaggacgattggttacaagaagcgcgaatcgtctgttatgagacttgccagtgttatgatcaaaattgcggcaaaagttttggtggtttttataaattacgctttcaccaccacgtattaaacttgattcgcaaagaacttgctcagaaacgacgggtcgatcagcaagccctgttatttgattgttgtccggaatgcaatgcgctcgctgaagataccgtggcatactatcagtcaacggttgaaatgcgggcgtacttagagacactatctgctttagagttagtggcctttcgggttttgacggggcaactagcagttgagcaagcgtgtagccagctagattgcacgtttgaacagatgaaacgggcacaatcgcgttgccagacaaaattaaaacgattctatactaaacaataaaatagctaaaagctgctaaccgacgatttttaggcattggttagcagttttttgtgtttagtagggagcataaaaaatacttttcatgcgataaaataacaggtgacaggttaatgattgggataggtcaacaaaatgggcggcttatatatttttaaataacattaattgacattaataaagaaagcgcttatactaaaaacatagaggaaatgaaaacgctttttataagccttttatcgctttctaaccaattaaaatttaaggggtaattcattatggcagaaaaaacaatcatgttatgttgtgcagcagggatgtcaacaagtttattagtttcaaagatgcaaaaggccgctgaagcacaaggtttagacgcagaaatttttgcaactggcgcttcagatgcagacaaccaactcgaatctaaaaaaattgactgcgtactattaggccctcaagttcgtttcatggaaggtcaatttaaagaaaaattggcaccaaaaggaatcggtgttgaagtaattgatatgaaggcttacggcatgatggacggcgaaactgtcttgaaacaagcgttagcattaatcggttaaaaaaagattaagaaaagcggtagcgacctatttttaggcggctaccgctttttttgtttatgaatcaggtataattaaggtaatcaagtataaaggagtttattcaatgagtttaattggtacattaatttggtggctattcgggggattagtagaggctatcggttggtttattctggggattgcctggagtattacgattattggaattccagtcgggctacaatgttttaagattggcgcattgaccttgatgccgtttaacgcaaccgttgtttcaacggggggtgcaggttcgtttttattaaacattgtttggtttttcttaggtggtcttgtgatgtgggcgagccatgtcttttgggggctattattatcaattacgattattgggattccatttggccggcaacactttaagctagcggcgttatcgttaagtccgttcggcaaacaaattaattaaaatgcaaaagggcaacgatattgatcgctacccttttttatgtggtgcaggcatatttctgtgcttagctacacaagtcaaacgattgcttgtagcaagcattcgccttgttaggctgatgctcgcagcataaccggcttttgacgcactctattgtgttagttcttctagtgccatcgcttgttcttcccagtctgattctgtttgagcgagttcagcttggactttttctaggtcttgttgtagttcttgaagcatgaggggtttagtaattacgtctgcttgggtcatttgttcttggattgcgttggccttagtctctagtgcggccattttttcttctaaagcagtaacttcgcgttctagtttccgttgtgcacgttggttttccttacttgctttgtaggcatctagtgcattggcacttggttggataattgcactgttttggctagctgcttctgcgtaagctgtttcttcagctttcttggcgaggtagtaatcgtaatcaccgaggtatcgtttgctaccagtatctgatagttcgataatgccagtggcgacttgattgatgaaataccggtcatgggaaatgaagaggacggtgccatcgaattcacggagggctttttccaagacttccttgctatcaatgtccaaatggttcgttggttcatccatgattaagaaattgtcatggttcatcgcgagtttcgtcaagagtaagcgggctttttcaccaccactgagttgtgacacaacctttaaaacatcgtcaccggtgaataagaaactaccaagtagtgtgcgaatttccttttcaggtgttgtatggtgttcatcccataattcgttgaggacggttttgttagtgtgtaaattgcgttgctcttgatcgtagtagcccattgaaacgttactaccgactttttcatggcctttgatgaacggaatttggtgcaagatacttttgagaagggtcgatttaccaattccgttaggtccgatgatggctaagcgttcgtggcggttcacttcaaaattgattggttgtaccatgattttatcgggggaatagccgacagcggcatcgcttacttgcaatacttcgttaccgcttggatgttcgctttcgaaatgaaaatgaattttaccggcttcgttttgcggccggtctaatttatccatcttttcgagttgacggcggcgactttgggcttgtttcgtggtacttgcgcgcactaagtttttatcaacaaaggtctgaagtttatcgatttcagcttgttgtttttcataagccttccattcgagtgagaggttagcttcttttaaacttaagaaatggctgtaattaccggtataatgggtcaatgtgtggcgactcatgtcgtagacttctttagtgattttatctaagaagtaccggtcatgtgagacggtgagcaaggcaccgggataagtttgtaaataattttccaaccatgttagtgtttcgatatctaaatggttcgttggttcgtccaaaataaggacgtcttttttctcaagcaataacttagcaagtgcgagtcgcgagcgttcgcctcccgatagtgtactgattggcttttcaaaggtgtcttctggaaattggaaaccatgtaagacgccacggatttcggcttcatagccgtaaccattagcttcagagaaatcgtgttggacttggtcatatcgttttagtaaggctgcatattcttcgctagcatggtcaatggttgtgtccgcaattgcggtctcgagttcatgcatttgggcttccatttggcggagatcatcgaaaatggttaacatctccgcatagattgtccgggttgagtctaagccactatcttgcgctaagtaaccgacttgagcatttttgctaagaatgatttggccttcatcaggcgttgtgatgccggcaatcatttttaataaggttgatttaccagccccgtttggaccaacgagggcaacacgggcgcggtcttgtacttcgagttgtgcgtttttgaaaaggtaatcgccgccaaaactgcgtgcgacttgttgaacttgtaataatatcacggctaaaaatcctttcgtgcggtgttttttaaagttaattgcgttcatttttataatactactgtcaactatcataacagatttaaacgatggacagtcaaaattgtaaatatattgcttttcacaagaaaattcagtatgatttcagtatggtactacactattttcacaagcaaatcaaaaaggaggtttcaaatggttgagaataatatcccaagagcaactgcaaaacgattgcctttatattaccgctatttaaactttttgaacaattcagggaaaactaaaatttcctctactggattatctgaagcagttaaagtagatagtgcgacaattcgtcgtgatttttcatatttcggtgcactgggcaaacgtggttatggctatgatgtcgcttcgttgctagattttttcaagaagaccttgaaccaagatcgattgacaaacgttgcattgattggggtggggaatttaggccacgccttattgaactacaactttaagcaaaccaataatattcggattagcgcagcatttgatgttaaacccgaaatgattggaacaattcaaaccggtgttcctgtctattcaatggacgagatggccgaacaattgaagaaccaacagatcgagattgtcattttaacagtgccaattgatgaagctcaagaagtcaccgatgaattagtggccgctgggattaaagggattatgaactttacgccaattcgaatttctgtgccatcaaacgtgcggattcaaaatgttgatttggctaaagaactacaaactttgatttacttcctcgataattatactgatgaacaaaatcaagaataaaaatagcgtttaaacaagttgctcgtagtagccgcctgtttgaacgctttttttaacgattgagatacagtaaagtgacgatcaggttcatcccagcatggctgatgattgtggtgaaaatcgaacctgtcttgcggtacagccaacataggaaaagaccgatggccgtgtagattaacaaatgcccgtcctgatgtaaaaaagcaaacagtaaacttgaaatgatggcggctaaaatgcggtttaagcgactggctaatccaccaaagattgctttgcgaaacgtgatttcttccataatcggtgcggcgatggtcgttgctaaaataagaaacggttgttgttgcatcatggtcatcagtgaaatggtgttgagcgatttggcagtgatgtggagaatgttttgttcaatgaagccggcgagaatctgaattactaagaccagtacaatgccacacaacccccaaatgataatgggtttgagtgggaaaggccgctgctcaatggcattggcttgtgtgcgttgattaagatagagtaaccaggcggcaccgaggcaatcaacaatggttgtgattagaaaaaacgaggcagatagatgaccaaaacggacgactgcactaggaatcaataaaatgaacaaatagctaatgataattgaaaaattttgtttgtatagcgtcatgtgaaagctcctcaaaggttgttgtgacaatagcttagcgtattagcattcaaattgcaaaagtgctagcataatacttgcaatgttctgaaaaaatgctatgataaaaattgtgattagcacttgagatgatagagtgctaaaaaagtaaaattgatggagggattttaagtgttaaaaccattagaagatcgcgtgattatcgccgttaaagacgaagaagaacaaacagtaggtgggattgttttggcaagtaatgctaaacaaaaaccacaaaccggcaaagtagtcgcagttggtaccggcacattaacaagtgacggcaaacgaattccacttgatattaaagaaaacgatgaagttatttacgataaatatgcaggttcagaagttgaatatgaaggtcaacaatatttagtgctccatgctaaagatattatggctattgttgaataataataaacaaaaaaattttttgaggtgaataaattatggcaaaagaacttaaattttcagaagacgcacgttcaaaaatgttggcaggggttgaccaattagccaacacagtgaaaacaacattaggaccaaaaggccggaacgttgttttggaaaaagcttacggttcaccagaaattactaatgatggtgtgacaattgctaaagcaatcgaattagaagatcattttgaaaatatgggtgctaagttagtttctgaagtggcttcaaaaacgaatgacatcgctggtgatgggacaactactgctactgttttagctcaagcaattattcgtgaagggatgaagaacgtcacagccggcgctaacccagttgggattcgtcgtgggattgaattagcaactaaagaagctgttaagaagttacacgaaatttcacacaaagtcgaaagtaaagatgccattgcccaagtggctgctgtttcatcagctaacgaagaaactggtcgtttaattgctgatgcaatggaaaaagttggcaacgatggggtcatcacagttgaagaatcaaaagggattgatactgaattaagcgttgttgaagggatgcaattcgaccgtggttacttgtcacaatacatggtaacggataacgataagatggaagctgacctagataacccgtatatcttaattacagataaaaagatttcaaatattcaagatgttttaccacttttacaatcaatcgtgcaagaaggtaaagccttgttaatcatcgctgatgatgttgatggcgaagcattaccaacacttgtcttgaacaagattcgtgggacattcaacgtggttgctgtaaaagcccctggttttggtgatcgtcgtaaggaacaattagaagatatcgccacattaacaggtgccacagtgattacaagtgacctcggtctagaattgaaagaaacaactatcgatcaattagggacagctggtaaggtaactgttacaaaagatgatacaacaatcgttgaaggtgctggtagcaaagatgccatcgctgaacgggttgaaaacatcaagaaacaaattgctgaaacaacatcagactttgaccgtgaaaaattacaagaacgcttggctaaattagctggtggcgttgcagtgattaaagtcggtgctgccacagaaacagaattgaaagaacaaaaatatcggattgaagatgctttgaacgcaacgcgtgcagctgttgaagaaggctacgttgccggcggtgggacagcattaatcgatgtgatcgaaagtgttgctgcgcttaaagaagaaggcgacgttcaaaccgggattaacattgtgcttcgtgcattggaagaacctgttcgtcaaatcgcaaccaacgctggtcttgaaggctcagtaattgttgaaaaagttaaatcacaaccagttgaagtcggctacaatgcagccaacggcaactgggaaaatatgattgaagccggcatcttagatccaactaaggtgacacgttcagcattacaaaatgcagctagtgtggcggccttaatgttaacaactgaagcagtggttgctgacaaaccagaagacaacccagcaccagcagcaggcatggacccatcagcaatgggcggtatgatgtaaagaagtgcgtttgaaacgggttggttctgagcattaacctaaaaacgagcgttatggcggtttttgccataacgctcgttttgtagttaagcggaaggcgttataaccaaaaagcacgattaaatccaaagttccaaaactggcaaaagttttggaacttttttatttttcaaaaaaaatgcgcatatataaattgtgcgcaaccctattaattaatttgattgcggtataataatagttggaggtgttgacaatgatttttcgaaaccggcggatactgataacctgtttaatgttaggtggcttctttttagcgcgaccacaaatggtccaagcaacgcctgaagaaacgcaaactgccattaagacagcacaagatcatctatccgaattgaataataatattagtaatttaacgttaaaaacaacgcaattgaacgaacaaatgactgcaaaacaggcggatattaaagaaaaacaagacgagttcagcaaaacatctgctgattatcaaaagcaagtggcgactattgaaggtaacctgcggcaattacaaacacgagatagcagttttaatcttgatatgatcgatagtttattgtcgagccaaagtttgagcgatttattccaaaaaggttcaatcatcaatcgactgttagacgctaaggcggataatgccgctgaaacggcctcattagctgaaaaaaagctgaacaaaagactgaattagaagcgcaacaggccaagctggtatcattatcacaggaaaatgatgccgcaattaaggacttagatcaacaaaaacaacaagctaacgaccaattaacgcaactacaaacgaagttcaagaaagaattagaggcgcaagcggctgctcaaaaagcggcgagtgatgcaggtgccgcattaattactggtaacaaggatttaatgaataataagattatccaagaagcggttaaatatttaggcgaccctatgtttggggtggcaccacacccgaaggatttgactgttctggcttagtgcaatacgtttacgctaaaaatgggattaaattaccccgtgtttcacaagatcaaagtaagttaggcaaagatgtaccgctcaatgaattacaaccaaacgacctattattctggggaggggttggaacagcccaccatgtcgcaatctacattggggatggctactttatccaagcaccacaacctggcgataaagttcgaattactaaaatttcagattacaaaccagattttgcccgtcgtttatcataaaaaataagaactgaccaaggaatcgaggcgtttcgattaccttggtcagttcttttttaaattgtggtagtaattcatgcgtaactatagtagaatacgatttgtttgaataaacggcaattatttttttaagttatagagaaattcaaaagtcactgtgtggattgcgacgaatgatattcacatgagggctttttatgttagaaatattatttaaaggggtcatattgctatgcaacagttaaaacggatttttatcgggaaaccgttaaaatcttccgatgagggtaatcaaaaattaggacgctttaaagcgttagcgatgctatcttctgatgcattgtcatcagtggcctacgggacagaagaaatcgtcatcgtattgacgaccctttcggccgcggcaatttggtattcaattccaatcgcagcctttgtgctcgtattgctattgtcattaactttgtcatatcgccaagtgatccacgcctatccaggtggtggtggcgcctacgttgtttccagtgaaaatttggggaaaaatgctggtttagtggcaggtggttcactgcttgtggattacatgttaaccgttgcggttagtatttccgcgggtgcggaagcgatcacctcggccattccggcattgtatgggcatcaagtagggatttccttcattatcgttttgatcttgatgggaatgaatctacgtgggatgcgtgaatcagcatcatttttaatggtgcccgtttacttattcgtcttgatgatgactttaatgatcatcgttgggtgttataagatcttcacaggtgcgattccgttccacgcaacatcaaccgttggggctgttgtaccaggtgtttcgatggcgttgatttttagagccttctcatcaggttcatcatcattaactggggttgaagccatcagtaatgcggtaccatttttcaagaagccacgtgcaacaaacgcggctgaaacattagcaatcatggcagccatcttaggtttcttctttgctgggattacatttttaaactactggtacggcattgtaccagcagaaaaagtaactgttctatcacaagtggcccaacacacctttgggaaaggctttttattctatattgtgcaatttgcaacggcctttattttagccgtcgctgcgaatactggattctccgcttttccagtgttagcgtataatttagccaaagacaaatatatgccacacatgtacatggatcgtggcgatcgtttaggttattcaaacgggattattacattggcgattggttcaatggcattgattttcatctttaacggggatacatcacgcttgattccactttatgcggttggtgtgttcattccatttacgctttctcaatctgggatgttgcgcaagtggtgggtcgaacgaccaaagaattggtttggtaaatcaattgccaattttgttggcgctttgatttcgtttgccatcttagtcattctcttcgtttatcgcttacctgatatctggccattcttcatcatcatgcctgttatgatttggattttctataagattcatgatcattacaagaaagtggcgcttcaactacgcgtgagtgctaaagaagccgtcttgcatgattatgacggttcaactgtgattgtcttggtcagcaacgtgacccaagtaacccgtggtgcgctagattacgcacaatcaatcggggattatgtgattgcgatgcatgtctcaacggatgaaaatccagccaaggaacgtgaaattcaagctgaattcaaggaagattttccgaatgtccggttcgtcgatgtccattcatcataccggtcaattcaaaaaccaattgttcgctttgttgacattgttagcaagaatgcgcaaaaacggaactttacaaccacggtcttggtcccacaattcgtaccaagaaaaccatggcaaaacattttgcataaccaatcaagtctaagactaagaacggcatttgcaaaccgcgaaaacattattatttcaacatatagttatcacttaaaacactagaagtgcgactcgatctgagtaggctttgaggattaacagtaaaatgggcattgtggcggttcttgccatgatgctcattttgcagttaaccggaaaagactgatcgaggagcgcgttaaagaaagaagtgcgtttagcaaccgagcattaatacaaaattggcagttatcccgagttgtgggatgactgccaattttagattaagcggaagttggtgcaactaaaagcacgttagaagagaagtgtgtttgaaacggtttgactttgagcattagcctaaatctgtgaatgagcgacggagttgatcgtttgcggattgtagctaagcgcaagagtcagtttcaaaaagcacgttaaaagaagaagtgtgttcaaaccgattatgttctgagaattagcaaaattagacgaataagcgacgaagtcgattggttggctaattaggctaaacgcaggaacatggtttgaaaagcacattatcagccccgctcaccttttcggtgcgcggggctttttttgtttttctacgggtacagcaaaactttttattctgggcaaaaattgctacaatagaagctatatcaaagtctgagaaagaacattaaggggcgcaacatgcgaattttatttattggtgatacagtgggcacaatgggtcaaaaaatgatcaatgattacctaccagcattaaagcaacaatacaaaccacaggtgaccattatcaacggcgaaaacatcgcggatggtaaggggatgactcaaaaggattataagaatcttttacaagctggggccgatgcgattacgatgggcaatcatacttggaataagcgcgatattttagaattcatcgacgatgctaaaaaattagtgcggccggccaattttccgaaaggaacgcctgggcaagggatgacaatgattaacgtcaatcaagccaaattagccgtgattaacttacaagggcgcgccttgatgaatgaactactaattgatccgtttgaaatgttagatgaaatggtggctgaaattagtaaagaaaccaactgtatcttcgttgattttcatgccgaaacgacgagtgaaaaactcgcacttgcttggtatcttgatggccggatttcagcgttagttgggacccatacacatgtgcaaacaaacgatgcgcgcgtcttacctgaaggcacagccgttttaacggatgctgggatgactggcccttataacgggattctaggcgtgaagcgcgaaaagatcattaatcggtttaaaacacaacggccagaacggtttgaattagtgaccgaaggaccgggtcaattgaatggctgtttaattgaaattgatgacaaaacgggtcacgctaaatcaattaaaccgatccagatttcaccagatcacccctatacgcaattttaagcaccttagcagcagatcaacgtcaatgagagagggattaacaacatgccacaaaaaacgaaagaaacgccaatgatggcgcaatatcaaaaggtcaaggatcagtatccggacgcttttttattttatcgcctcggtgatttttacgaactctttaatgatgatgctgtcaaagcttcacaattattggaactcacactaacagcacgcaataaaaatgcggatgatccaattccaatgtgtggggtaccacaccacgcagcccaaaattacatcgatattctagtcgatcaaggttacaaggttgctatttgtgaacaaatggaagatcctaaaaccgctaaagggatggtcaatcgggaagtcattcaactggtcacaccaggaacgatgatggatgaaaaagccggccatgccaaacaaaataattacttaacagcagtggtggcagatggcgatcagtttggctttgcttataccgatttatcaactggtgagatgaaagtcagccagattgcgagtttggatttattgctcaacgaaatgttgagtttacaaaccaaagaagttgtcattaaccacggtgttaccagtgaggttgtgcacgcgtttgttcaacaacaaattctcgtgtcgtatcaagaagatggcgatgcaacggccgaagtcagtttcgtttcacaaaacatctcccagccccttgaactggccgtgattaaacaattggtcttgtatttggcaacgacgcaaaagcgccatttagggcatttacaacgggcccaagagtacgagccatcccaatatttaaaattagaccattctgcgaagatgaaccttgaattaacggcttctttacgcactggtcataagagcgggacattattgtggttattggatgaaaccaagacggcaatgggtggccggttattaaaacaatggttagaacggccattattggatttaaaggcgattcaaaaccggcaacgccaagtcgctagtttcatgaaccattattttgaacggacaaacttgcaagacgccctcacaaaagtgtatgacctagaacggctagcaggtcgggtcgcatttggcagtgttaatggccgcgatttaattcagttgaagacttccttggaacaaattccaacgattaaaacgattttaacgggcattaatgacgatcagacctttgaccgtgcgttagaccaactcgatccggttgatgatgtacgcgagctcattgaaacggccatcaatcccgatgcgccaatttcagtgactgacggtgggattattcaatcgggttacaacgaaacattagatgattatcgcgatgcgatgtctaacgggaaacaatggctagcacaacttgaagctaaagaacgcgaaattaccgggattcataatttaaaaattggctttaatcgcgtgtttggttactatatcgaagtgacacgtgcgaatttagacgcgctacctgaagggcgttatgaacggaaacaaaccttaaccaacgccgaacggttcattacaccggaattaaaggcgaaagaacaattgattttagaagccgaagaacgctcaaccgcgcttgaatatgagttattcacgcaagttcgcgaaaccgttaagttggagattgaacggcttcaaaccctcgctaaaagtgtggcggcccttgatgtcttacaaagttttgccgtagtcagtgaaaactaccactacgttcagccgacattaatgactgatagtcgcgaaattgatttagtggatgggcgtcatccagtggttgaaaaagtgctcggtcgccaaaaatacattcccaacgcggttcaaatgggcaccgatacggatatgctcttaattactggtccgaatatgtctgggaagagtacgtacatgcggcaactggctttgacggtcatcatggcgcagatgggatgttttgtaccggctaaatctgcgaacttaccgatttttgatcagatctttacgcgcattggtgcggccgatgatttaatttccggtcaaagtaccttcatggtcgaaatgatggaagccaatcgcgcgattatgaacgcgacacaaaatagcttgattctctttgacgaaatcggacgcggaacagccacctatgatggaatggccttggcccaagcgattattgaatacattcacgacaacgtgcatgccaagatactcttttcaacgcattatcacgaattgaccagcttagcggattcactaaccgcattgaaaaacgtccacgtcggggcagttgaagaaaatggcgagttagtctttttacacaagatgctggctggcccagctgataagtcatacgggattcacgtggctaaattagcggggatgccgacaccgttgttgaaccgcgcagatgtcatcttggatcaattagaagataaaccaaaggcagctgtcgcgccggctgctgaaccggttgaagaagtggatgaacaaatttcactattcgaaccagaagtggcaccacaagcggatccaaaagcagctaaagtcctagcggcggttaaacaattcgacttaatgagcgccacaccactagacgcgctaaacatgctatacaaatggcaaaaggaattaaacaaataagagtgcgtcatcaacgggtaacttctgagcatttacagcacttgacgaattggcgatgtaatcgccgatttggcaagtggggtaaagcggaagaagttgttgatgaaagcacgtttcggataagagtgtattcaagcttgtccaacttttgagcattagcacagggaagcgaattagcgacgcagtcgatgatttgattcacagcgctaagcgcagaaagttagcttgaaaagcacgttttagcactaaatacccacacgtcagaaaaaggagaacgctaatggggaaaattcatgaactgtcagaaatattaagtaaccaaattgcggcgggcgaagtaattgagcggccagcttcagttgtcaaagagttggcagaaaatgcgattgacgccaatagtactcaaattgacatcgtgattgaacaggctggtttgcaattgattcaagtcatcgataacggcgatgggattgaaccggaagatgtacccactgcatttaagcgacacgcgacaagtaagattgccacgcgccaggatcttttcaaaattcagtcacttggctttcggggtgaagcgttagccagtatcgcgtcagtgtccgatttgacgattgaaacggcaaccgctgattcgttagggacatttgctcattttaaaggtggcgtcttagaagaacagaaaactaatccaattcgccctgggacggcaatcacggttcgtgatttattcttcaacacgccagcccgcttgaaatatgtgaagacgttccagactgaattggcaaacgtgatcgatatcgtcaatcgcttggcgatgagtcatcctcagattgcgttcacgttaaccaatgatgatcacctgctgttaaaaacggcgggtaataacgatttacaacagacgattgccgggatctatggcgttacaatggctaagcaactcttgccagtcagtgcagaagatctcgattttaaattaaccggctatgtatcgctaccgaaactaacgcgggccagtcgtaattacatttcagtgttgattaatggtcgttatatcaagaattatcaattgaataaggcgattatcaagggttacggttcaaaattaatggtcggccgttatccagtcgtcgttttaaatattcaaatggatccactgttaatcgatgtcaatgtccatccgaccaagcaagaagtccgcttgagtaaggaacctgctttgatggcgttgattgaaaaagcaattcgtgagcgactcagcaccgagaatttaattcccggtgcagtgcagaatctaaaacaaacgaaaccggtcgatgtggaccagcttcaaatggatttaaaccaaattacgagtcaacggcgcaatgcgactggtacggtgcggccaattcagccccaaacagttcctgaaaagccggttaaaactgaaatgcaagcggcagcgcaaattgcggaaaccgaaacaccccttaaacgagaaccaactgctaatcctaatttaaatagcctgccgatatttgaacaaccccaacaattggcccggtgggatgataagtacgaagcagaggcgatcggaaatccgtttggtgaacaacctgaagatgatgcagcacccattgagcgtttcccagcgttacgctatattggacaactgcacaatacattcttattagcagaaggtgaagatggcttttacatcttagatcaacatgctgctcaagaacggattaagtatgaatactatcgcgaaaaaattggtgaagttagcaacgacgcccagaatttattggtgccccttgtgttggaatatcccaatagtgatgcgattaagattcaagcacaaaaggaactccttgccgcagtgggtgtgcagctagagagcttcggccaaaatagttttgttatccatagtcatccgacgtggattgcgcaaggccaagaagaagcaacgattcgcgagatgattgacactgtattggaaaacgggaagttagacattgcccatttccgtgaaaaaacggcgattatgatcagctgtaaacagtcaatcaaggcacaccatcacttagatgatgcgcaagctaaagcattgttggttgatctggcacagacggaaaatccgtttaactgtccacatggccgaccggttttaatccattacacgcaaaaagatttagaaaaaatgtttaaacggattcaagatccacaccatagttgggagggcgaataatgtttatcttagcatcacaatcaccaagacgccgcgaacttttacaaaaagtcgtgcctgatttcgaagtccaacccgcaacaatcgatgaacgccaggtaccagtgacggcaccagctgactacgtgcagatgttggcgcaacttaagggtgaatccatcgcccaaaagaatcctcaggccactgtgctcagtgctgatactgttgtcagttttcagggcacgatttacggtaagccacatgatcgtcaagatgcagccgaaatgttacggcaattgagtggcagcacgcatcaagcttatacaggtgtttggttatccattgatggtgaaatccgcaaaacggttgtccaaactgatgtcacgttctggccgttaagtcatgaaatgattgaaacgtatttagacaccgaagagtaccgggataaggctggtgcttatggtattcagggacagggaagtctgctcgttgagaaaatcaacggtgacttttacaatgttgttggcttgcccatcagtacggtggctcggttgttaaccgctaaggaggctgactaatggcaacgcaaaacattgccgtttattgcggcgctagtagtggtaataaaataatctacacggaagcggctaaggcgttaggcacttggattgctgggcgcaatgcgcgcttgatttatggcggcgcccaagttggtttaatgggcaccgtggccgacacggtgttagcccatgatggacaagtgaccggcgtcatgccagggtttatgagtcagcaagaactcgtccatccaggtttaaccgaaatgattaaggttgatacgatgtcagcgcgtaaagccaagatgattgaactggcagatgtgtttatcgcattgccgggtggtcccggtacgctggaagaaatgagtgaagttatttcatgggcgcgaattgggcaacaaaatggtccctgcattttttataatgtcgcaggctattatgatttgttacaacaatttttagcccacatggtcagtgaaggttttttaacacaggtcgattttgaaaaatacttatttaccgattcgttcagtgtgatggcatcctttatcaaggattaccaaccgccgaagattcgtgaatactaattgctagggtttgagttggccgtgggtcacacttaggcccttcttttacgctttttggctgctggctgtttcacgattcggattttatgttacaatttaacaagcaaatatacgttctcgtaaagtaggtaaatttatgtatgaatatttaaaaggtttggtgacggcggttagtccgtactatgtcgtcttagaagttcaaggcgtcggctatcaattgcaagttgctaatccgtatcgttacaccgaatcaacgaccgatatcgttcagatttatgtctatcaagcggttcgtgatacggatatcacgttatttggtttttacgatctagatgaaaagcaaattttccaaaaattaatcagtgtttctggaattggtcctaagagtgccttggccatcttagccaatagcgatcattctgggttaatccaagcgattatgaatgatgatgtgagctatttgaccaagttccctggggttggcaagaagactgcccaacaaattgtcttagatttaaagggcaagctcggtgatttggaacaaaccgaaacgctcgctggtcaaacggctatcgatcttggtacgcctggtgaatcaccagaattaaacgatgcgttagcggcgttaaccgcgcttgggtattcagcccgcgaagtcaaagcgattaccaaaacactggctgatttcaatgcacaaactacggatcagtacttacgtgaaggtttacgcttattaatgaagaaataaaggaggactaatggatggcagaagaacgaattgtttccgcagaaaacgaagatttcgcagaaacaagtattgaaaagacgttacggccacaagtcctcgcgcaatatatcggtcaagaccgggtcaaaaatgagttggcggtttatattgaagccgctaaaaagcgggaagagtcgttggaccatgtgctattatatggcccgcctggtttaggtaagacgaccttggcgatggtgattgccaatgaactgcatgttcagattcggacgacgagtgggccagcaattgaacggcctggcgatttagtcgcattgttgaacgagttacaacctggtgatgtactatttatcgatgaaattcatcgcttgccgaaagtggtcgaagaactactttattcggcgatggaagatttttacatcgatatcgtggtcggacaagggccaactgcgcacccggtgcattttccattgccaccgtttaccttgattggcgcaacgactcgggccggtttattgtcggcaccgttacgtgatcgtttcggaatcgtcgaacatatggcatactatgatgaagatgatttggtcgatatcgttgaacgctcggcagatgtctttaacatggccattgtccaagaaggcgcgcatgagattgcccgtcgttcgcgggggacgccgcggattgcgaaccgcttattaaaacggattcgcgattacgctcaagtggcggaccaagcggcaattgatcaagcgattgccgaccatgcgcttagtcaactacaagtcgatgtacgtggcttagatagtattgaccgcaagattctccagatgatgattgactattatcatggcggtccagtcggtctaaagacgattgcggctaatattggtgaagaaaatgaaacaatcgaagccgtttacgaaccgtatttgttacagattgggttcttaaaacggacaccgcggggacgtgttgtgacgcccgctggttatgaacatctcggcattccctattcagaaaattagaaagaggttacacaatggtttcaacagaagattttgattataatttaccagaagaattaattgctcaaacaccgatgattgaacgggcagcgtctcgtttattggtgatggatcacaaaacaggcgcactagaagataaagttttctacgacattatcgatgaattaaatcccggcgatgcagttgtcatgaacaatacgcgggtcttgccagcacgtttatacggtgtcaaaccggatacgggtggccacgaagaagtcttgcttttaaacaacacgcatgacgatgaatgggaagttttgatgaagccagcacgccgggccaaagtcggcaccgaagtcgtttttggtgatggtcaattaaaagcagttgtgaccaaggaactcgaacacggtggccgcatgatcgaatttaagtatgatggcatcttcatgcaaattctagaagccttaggcgaaatgcctctaccaccatacataaaagaaaaattagacgatccagaaatgtatcaaaccgtttatgctaaagaaccaggttcagctgccgcaccaactgctggcttccactggacagaagaactcttgcaaaaggtgcaagataaaggcatcaaactcgtgtacttaacgttgcatgttgggttgggaactttccggcctgtttcagaagacaacgtggaagatcacaaaatgcacagcgaattttaccgtttaacagaagaagctgctgcaacgttgaatgaagttaaacaaaacggtggccgcatcgtggcaacggggacaaccagcattcggacgctagaaacaattgcgacgaagtttgatggtgaactcaaagctgatagtggctggacatcaatctttatcaaacctggttatcaatggaaagctgttgatgcattcatcacgaacttccatttaccaaaatcaaccttagtgatgttggtcgcttcatttaccggtcgcgaaaacatcttaaatgcttatcaacacgctgttgatgaacggtatcgtttctttagcttcggcgatgccatgtttgttaaataattcgacaaaaatgaggtggcagcattgatgtatttgagaaaagcaacgtttacagatttaccgcggattttagagattatcgaacatgcaaaggccgccttaaaggatcgccaaataaatcaatggcaagcaggtgaacctaatcaaactcagtttgaagacgagattcgccaagaattatgttacattctgatggctgaccaacaggtgattggggtcgcctcaattctagcaactgaagatcctggctatgcagcaattaccaatggtcaatggcaatctggttcgacaccttatttttcaattcaccgtgtcgcactcgatagtgccttccacggccaacatctcgggacacagtttttaaccttattggtgaccgctgccagtttacgaggcgcacatgatttacgcatcgatacgcaccctgataacttggcgatgcaacatatgattcaaaaagtaggctttcaatatcgtggtgacatcttcattgcaaacggtccgtcaccgaaacgctatgcgtaccaattattactgaaccaacaataatcctagaattggagtcgattaaatggaaccagcgatcaagtatcgtttaatcaagaaagaaaaacataccagggcgcgccttggtgaaattgtgacaccacatggcacgtttaaaacacccatgtttatgccagttgggacccaagccagtgttaagacaatggcgcctgaagaattaaaagaaatgggtgccggcattattttatcgaacacctatcatctctggttacgacctggggaagacatcgttgaaaaagccggtggtcttcataagttcatgaactgggatcgcggtgtgttaaccgattctggtggtttccaagtgttctcacttgcgagattacgggatatcagtgaagaaggggttgctttcaagagtcatttgagcggcgaaaaactgttcttatcaccggaaaaagcaatccaagtcgaaaatgctttgggtgccgatatcatgatgagtttcgatgaatgtccaccattctttgaaagttatgactacgttaaaaaatcagttgaacggacatcacgttgggctgaacggggcttgattgcgcatcaaaacccagcaacgcaaggtctatttgggattgtccaaggggccggctttgaagacttacgccgccaaagtgcgcgcgatttagttgggatggacttccccggttattcaatcggtggcttatcagttggtgaatcaaaaggcgaaatgaatcgcgtgcttgatttcacaacaccaatgttacctgaagacaaaccacggtacttgatgggcgtcggttcgcctgatgccttaatcgatggtgtgattcgcggtgtcgatatgttcgattgcgtgttgccaacccggattgcccgtaatgggacaacgatgacctcacaaggccgattagtggttaagaatgcgaagtactcagaagacttccgcccattggatcctaagtgtgattgttatgtctgcaagaactacacccgcgcttacattcggcacttgattaaagcggacgaaacgtttgggattcatttgacgagttaccataacttatacttcttgattaatttgatgcatcaagtgcaagatgccatcgaacaagataatttattggaattcagagaagcgttcttcgaagaatatggttacaatgaaaagaacactcggaatttctagtgaatcactggaagttgcttgataagtctgatagagttagtaatagacaaaattgaaaagaggttttttaaatggcaaactttgtgttaggtgccggcggttttaatcccagtttcttcgttatcttaattttaatgatggcaatgatgtatttcatggtaatgcgcccacaaaagaaacaacaacaaaaacaccaagaaatggtgaaccaaatgaaaaaaggcgacgcagtcatcacaatcggtggtttacacggtgtgattgattctgttaatacagatactaaaatcgttgtcttagattgtgacggcgtttacctcaagtttaacttgagcgcaatccggacagtaacaccaactgcttcagaagccgcaacagtggttgaagaagaaacggttgaagaaacaaaagaagatacaaaataattcagagagcgctcgattgaatacttcaaccgagcgcttttttatttgcattatatagtaaatttattatcaaatgtaggcttttaaaagataaatcgcctttaactaagaaataaaatttgtaattataatcacaaaacagtttacaaacaactcaaaatgcgctaaactaactttgttaaataaatcacaatagttaattggcatggagggaatcgatatggttaagaaagcagcagttgaaacggttgaaaacacagtgaatgaaatggtcaccgatttagtgacgcgtgcacaacgggcattagcaattttggaaacattcgatcaagccaagattgataatattgtccatcaaatggcgattgctgggttagaccaacatatggcactcgctaagatggcggttgaagaaactggccgtgggatttatgaagataaagccatcaagaatatttttgcaaccgaggaaatttggaatgcgattaaagacaataaaacagttggtgtgattgaagaagatccagaacatggcatcactaagattgcagaacccgttggtgtcattgctggtgtaacaccagtcacgaatccaacctcgacgacgatttttaaagctgagatcgcgattaaaacgcggaatccaatcatctttgctttccatcctagtgcgcaacgttgttcggctgaagcattgaatgtcattaaagctgcagcagttaaagccggtatgccagcagatgcactcttatatatcgaagaaccaagtattgcagctacccaggctttaatgaaccatgaaggggtcgcaactgttttagcaactggtggtcctgggatggtgaaagccgcttattcaactggtaaacccgcactgggggttggggctgggaatgcgccagcgtatatcgaagcttcggcgaacatcaaacaagccgtcaatgatttaatcctctcgaaatcatttgataacgggatgatttgtgcttctgaacaagccgtaattgttgatgctgaaatttatacggcagtgaagaaggaattccaagcacaaggggtttacttcgctaaaccaagcgaattatcagcactcaatgacgcagtaatcgacccagataagaatgcggtccgaccttcaattccaggccaatctgctgctaaaattgccaaactagctgggatcgatattccagaagatacgccagttttaattgctgaaattaaaggtgttggacaccaatatccactctcacatgaaaaattatcacccgtacttgcgatgattaaagctaaagatcgcgaagatggcttgcaactctgtgaagcaatgctagatcttggtggtcttgggcatacggcttcgttgcatacaacggatgaagctttaccactcgaatttgcaaaacggatgaaagcatgccgggtcttagtgaatacaccatcagcacaaggtgggattggtgatttatacaatgacatgttaccatcattaaccttaggctgtgggtcatacggccataactcaatctcccacaacgtttcaacgatcgatttgttgaacgtgaagacgctaaccaagcgccggaataacatgcaatgggtgaagttgcccagcaaaatctattttgaaaaaaattcagtcaactatttagaaaaaatggcggacttgcataaggtttttatcgtcgctgatcaagggatggtcgacttaggttacgtgcaaattgttgaagacgtcttggcgcgccgcacagatcaagtgcaggtccaagtatttgccgatgtcgagccagatccatcaaccgataccatttataaaggcgccgaagtgatgaaacgcttcaaacccgatacaattgttgctattggtgggggctcagtcatggatgcggccaaagggatgtggttattctatgattcagaagatgccgacttctttggcgctaagcaaaaattcttagatattcggaaacggacttacaagttcccaaacctcgatcggacgaaactaatctgtatcccaaccacttctggaacgggttctgaagtaacgccgtttgcggtcattactgatagtgaaacgcacatcaaatatccattggcagattatgcgttaacaccagatgtggcaattgtggatagtcaattcatcgaaagtgtgccaccccgcgtggttgcgcatactgggatggacgttttatgccacgcgactgaaagttacgtatcagcgatggcgtcaaattatacaaaagggctcagtttgcaagccattaaattagtgtttgataacttacaagcgagttatgcgggcgataagacagctaaagccaatatgcatgatgcgtcaacaatggcgggaatggcgtttgccaatgcgctattaggtatcaaccattcactggcgcacaaactgggcggcgcgttcaatttgccgcacggattgatgattgccattacaatgccgcatgtcattcgctataatgctaagacaccaacgaaacgggcactctgggctaaatacagttacttcagagcagatgaagattatgctgaaattgcacgttatctcggtttaccaggtaaaacgactgaagaactggtggccgcttacgcagatgctgtgactgcattggcggaaagtatcggcatcaagatgcgtttacgtgataatggcgtgacaaaggccgactttgatcgccacgttgatgatttagcagaactggcatatgaagataactgtacggtaaccaatccaaaagaaccattaattaaagaattgaaagggattctcgaagcagaattctagcaaattgaccaagtgatttgctagaataagtggtttgagaagcccgaccacaaatttaaggcggtagactgaaacaaatcggtctaccgcctttttttgttgctgaaaagagattaattttttactatttaagggattaaattgaagcttaatggtatgaaaattattacaaataaggcataatagaaagtagacattcatttagttcagggataactaagaaaagtttgtcgacaaacttgattaaggatctggatggcaatgacacccaataaagaagactatttaaaaattatttttgaacttggtggcgacgcaaagaaagttaccaataaggaaatactagcgggattgaacgtttcggcggcatcagtcacggaaatggtcaataagttagtgaaggaaaactacgtcaaccacacaccttaccaaggaattcaactaacaagtgaaggcgcccgcgaagcagccctattagtgcgcaatcatcggttatgggaagtttttttagtcgacaagttacattatcaattcaatacggtgcacccagaagcagaacaactcgaacatgttactaatcacgacttggctgaacggttagctgatttcttggggcatccaacgcgttgcccgcatggtgggattatacccaatgccaagggggaattcgaacaacaaagtcacatcgcacttgaaacattacaagtgggtgaaacggcgattatcgatcgcgtattggatgataatgacttattaaaatatacactggaaatcggcttgtcagtcggtgacagtgtgacgctccaaaaggttggcctcttcgaaagtccgttgactgtttttaataatacgagtcaaacagaaatccaaatcggcctcaaagcggcacaacacatctttgtgacgccacaaaattaatttatatgaaagtggtgtgagatatgcacacagatttagcagcactctttattatttttggtggttccggggacttagcccaacggaaattataccccgcattatttaatttataccggaagggttatttaaaagaacacttcgctgtcattggaacagcacggcggccatggacggatgatcattatcacgaaatcgtcatgacagctttggacaactttgatgaagatcaagcaactaaagaagctttcgtaggtcatttctattatcaatcacatgatgtgacggacgccaagcactacgaaacattaaaggctttagcaagtcagttggatgaacaatacgaattacaccaaaatcggatttattacatggccatgtcaccacggttcttcgggacaatcgcaagtcatctcggatcagaagcgctcctaacggcggatggctttaaccggttgattatcgaaaaaccatttggtcgcgattatgaaagtgctaaggcgcttaaccaagaattgacgcaaacctttgatgaagaccaaatctaccggattgatcactaccttggtaaagagatgattcaaaatatcgttgctttgcgttttgggaacggtctattgagtggtgtatggaataatcaattcattgataacgtccaaattacgttggctgaatcagtaggggttgaagaacgcgctggctattacgaaacatcgggggccttgcgcgatatgttccaaaaccatatcatgcaagtgatcggaatgcttgcaatggaagtgccggttaactttacggcagaagatgtacaacgtgaaaaaacacgtcttttcagaagtattcaaccttactcaccagcagaaatcaaacaaaactttgtgcgcgcccaatatgctgaaacatcggtggatggcgaaaacaaaccggggtatcaacaagaaaccaacgttgcgcctgattcacaaaccgaaacatttgtcgctgggaaagtgatgattgataacgaacggtggtgtggcgtaccattttacgtccggaccggtaaacgattggcacgtaaagaaacgcaaatcaatatcgtcttcaagaagactggcgtcaatatttttgctgatgataagtcagatcgttcagcaatggcacctgatgtcttaacaatctatgtcgaaccggaacaaggcttttcattaacgattaatggtaaagaagtcggtcaaggattcgccttgaaacctgatcaattggcttaccaatatgatgaacagatgttggctgacagtccagaagcttatgaacgtttgattttagaagcgctcaatggggatggcacgaacttcacacattggcatgaattagccgcttcatggcaatttgtcgatgcgattcgtgaagtctgggatgcggatcaaacgccactaccaggttactcaatcggttcaatggggcctaaagaagcaacagatttactggcaacaacaggggccgaatggatttttgatcccactcaaaataattaaattaaacaagtcagcaaagtctgtgtatgagatgctcatgccaggcttttcttattgaaagaagtacgtcatcaacgggtaacttctgagcatttacagcacttgacgaattggcgacggaatcgccgatttggcaagtgaggtaaagcggaagaagttgttgataaaagcacgttaaaggaagaagtgcgttaattcgcggttagcctttgagcatttgcctaatcagacggataagcgccaagggcgattatttggctgatgtagcaaagcacagaaggttacgaattaaaagcacgttaaagaaagaagtgcgtcaaaagcggaacaatgtgcctgaaaaagcatgttgaaaaaattaaggaggggtaacatggcagagctgttcaagattccattagaaaatgatacgagtcgcaaaatcattcacattgatatggacgcgttttacgcatcgattgaagagcgtgaacagcccgacttacgccaaaagcccctcgtgattgcccgtaatccgagtgatactggtggcaaaggggtcgtgacgaccgcgaactatgttgcccgacaatacggtgtgcactcggcgatgagtgcgcaaaaagcagctgaactgattccgaatcaccaagccgtttttaaggcgcccaattttccgctttatcaatcggtctcggaacagattcacacgatttttcatacggtaaccgataagattgaaccgattgcttttgatgaagcgtaccttgatgtcacggaaaataaactcggcttggcacacacaattgatgtggtcgcctacattcaaaaagaaatccttaaagaaacccaactcgtcagctcggcggggatttcgtacaataaatttttagcaaagatggcatcggattaccgcaagccagcggggcggacactcgttttgccggaacaagcgattgcctttttaagtcgcttgccaattgaaaaattccgtggggtcggtaagaaaacggcgccgcgaatgcaagaactcgggattttaacgggggcggacttgcttgaacaatcagaaatgatgctgatgcaaaatttcggcaagcttggctacggcttatatcggcacgtgcgcggcatcgataatcgcccggtcgcctaccaacgtgaacgcaaatcaattggcaatgagaatacttacgggcaacccctaatcagtgaagagcaggtgcaagttgagttgaagaagttagcgattgaacttgaacggcgtttacgcaagaatcaaaaacacggtttgacagttgttttaaaagtgcggaatcgccaatttgaaactattactaagcgtaaaacatttaacgaatatgtcggcaaggcagctgaactcgaggcgatcgcttgggaaatttggcaaaccatcggccatgcagaagatggcgtgcgcttgctcgggattacggtgactaacttggcaccgcaaacatttgaaaacatcacgttaccgttatacgattgggagcgtgaatagttgagtttcctttgtttttgtgcgctaaaaccgatatactattaataactatgtaaatctgataaagggtggtggcgttgagtggcaactaagcatgatcaaattttaatgtacatcgaaaatttaccaattggtgacaagatttcggtgcgctcaattgccaaaacactctcggtaagtgaaggaacggcttatcgcgcaattaaagcggcagaaaataacggcctggtcagcacaattgaacgggtcggtaccatccgcattgaacagaagttaaaggggaagattgaaaatctgacctttgaagaaatcgttcaagtgattgacggcgaggtccttggtggccgcgctggtttagacaagttgttggacaaatttgtgattggcgcgatgcaaatcgatgccatcacgcgctacattacgccaaagtcattgatgattgttggtgatcggacggatgtgcaacgcttagcacttgaaaacggggccgctgttttgattaccggcggttttggcacttcggcggacgtcattgcattggccaacgacttggctttaccgattttgcaaactgcctacgatacctattcggtggcggcattgattaatcgggcgttgaccgatcaattgattaaaaaagaaatcataacggtggctgatatctaccacccacttgctgaaatccacacgttacatgctaatcaaacggtagccgactacaagcaattgagtgcggcggtaaaacaatcgcgttttccagtcgtcaacgaacatatgcgcctcgttgggattgtgacggtgaaggatattttagataaaccggccacgatgaccttggataaagtcatgaccaaggaacccgcgagcgttaaaaaatacatgagtgttgccagtgtcggccattcaatgacttggaatagtttagaagtgatgccagtggtggcggacaatttagaactagaagggttaattacccggcaagatgtcatgagcaacatgcaaacggcgcaacgccaaccgcaagtcgccgagacgttttatgatcagattgtcgaaccactgcgtcctagtgaaactgtcccagacttttatacggcggcatatgaatatgaagtgacgccccagatgacgaataacttagggacaatttcgtttggtgtactgaccgaagcggtttcggcagcttgtcaacaaatgctccagacgcaacatcagcgctattcaatgattgaacagatcaacctccattatttacggttgattcaaatcgacacgcagattcagattttaccacgcttgctcgaaattggacggcgttcagctaaaatcgatgtcgatgtttacgccaatcatgtgattgtggctaaggccctcgtcactggtcaactcttagaaagaggttaataaatgacaactccagaacaaattattgctaaaattgaaacttacgatacgattatcatccatcgtcatgtcaatcctgatcctgatgcgattggctcacaagttggcttagctgaagtactgcgtaacagctacccagacaagacgatttaccaagtcgggagcgacaccggtaacttggcatggctcgcaaacgttcaagaaattgaaccggctgcttatcaaggtgcattagtgattgtgactgatacagccaactcacctcggattagtggtgagacgtttaacttaggcgctgaattaatcaaaattgatcatcatcccaacgatgatccttatggggatttaaactgggtgttacctgatgcctcaagtacctcagaaatcattattgacatcgtcaataacagcgaaggccacttacaattcaatcaagcagctgcgcgtgttttatatgccgggattgttggtgatacggggcgcttcatgtttaattcaaccagtccacataccatggaatgtgccgcccaaatgatgacgtttgatattcaccatgataagctcaatcaaaagatgaacgaaatcacgttggaacaagccaaattacaagggtacttattcgatcaacttcaagtgaacgaccaacaagtcgcctacttagtggttgatcgcgcaacccaggaccggttacatgttgaaccgcaacaagtacactcgattgttggaacacccggtcgtttgaaaggggtattaacgtgggtcatcttcgtgcaacaagcagatgacacttaccgtgtgcatttccgctcaaagggcccaatcattaatgaactagcgaagcaacatgatggcggtggtcatccactcgctagtggcgctaaggcagctgatcaagctgaaatcgacataattattgcagaattatcagcgctagccgcgcagtacactgaatagacgcagatccagatttaccggattcaaacaatagaaagcaggactttatggataatcaatttacacaatttaatctaaaacccgaaattattgcggctttagacgacatgcactttacaaaacccacggcggttcaacggcgtgtgattccagccatcaacgctggtaaaagtgttatcggtcaatcacaaacggggagtgggaaaacccacgcgttcttattaccccttttaaataaactggtgcctgaaaaagacgaagttcaaatcgtcatcacagccccaagtcgcgaattggcttaccaaatctatacggctgccgaattaatcactcaacacatgacgggggatattcggattggtcgttatgttggtgggactgacaagcaacgccaaatcgaaaaactcgaacaacatcaaccacagattgtgattgggactcctggtcgaattttagatttaatcaagagcaaggcgcttaagatttatacagcgaagatcttggtcatcgatgaagcggatatgacacttgacatgggctttttgaagccagttgatgacatcgctagtcgtttgccagaagacttacaaatgatggtcttctcagcaaccattcctgataagttacaacccttcttacaaaaatacatgcacaatcctgtgattgaagaagttaaaaacgaaactgtgattagcccaacaatcgacaactggttagtgccaacgaaggggaaagccctcaaccaaaccatttattcattattgacgatgggccatcctttcatggtcttggttttcgctaatacgaagagcaaggttgatgacatccaccgttatttacaatcacaaggcttgaaagtcgctaaaattcatggcgatattccaccacgccaacgtaaacggattatgaaagaaattcataacttagactatcaatatgttgtggcaactgatttagcggcccgcggtattgatatcgaagggattagcatggtcattaatgctgaagtcccacgtgaagatttagaattcttcattcaccgggttggtcggactggtcggaatggtcttaaaggaaccgcgattacgctttatggtccagatgatgaacaagccgttgcacaaattgaagcaatgggcatcaagttcacaccaaagacatttaaagatggcgaattggtcacatcatatgatcggaaccgtcgtaaaaaacgggtagctaccacgcatgaattagatgtcggcatgaaagggatggtcaaaaaggccaaacttaaacgcaaacccggttataagaaaaagattaaagcagccattaaacaagatgcacaaaagaaacgccggattgaacaacgacttgaattacgtgaaaagaaacgtcaaaacaagaagcaaaatagctagttaattcataatcgaggtggctgtgatgcatgaaaatgacttacaattactgaactggttatcgttatccgaagaagcacggcgcgctaattttggccaggtgttgcgctactttgttagcccgctgattccaattgaagcgattcagagtgagaccgcaacgattggcactcaagtatttcaaacttacagtgcccggctagctgggcagcagtttatttttatccccggccaagctaatgtgcagttgggatggcaagcaggggcagcccacttagcaccgagtgagtggtttgcacaaactaaacgtacgttaccagttgatcaaggactcgtttgggcgacgcaagcggatgtcgatcaatacgttgatcagatgacatcagaatatcggattgttaatatggcaccgatgttagtggcacaaacaccaatttcaagtgagtgggtactccaaggcgagtatgaaacgacaacaggacgttttaatggaaaccaactagttgggcgtcagtttttggcggaaatccaaaataccttgtttcgggcgcggcgggaacaaaattcagctgaaacacttgaaagtgcgcacctaattttacaagcgggtgggcgaccagattgttaccaagtgtttgaaaaaactaatggtgacgaaagtgaactacgccagacattgcggcggcgcggttttgatctggtgagtgttgatcagtatgaatggcttaaaggtgcagggagtaagacgttgtggttaagtggtaatcacttaccacgaccgactcagcgccagcagatgccatttgggttacaagcaacagccgctgacggttatgaacttactcaagatccacttgtttataagggtggtgcttgtgtgacagggggacggtatagtttggaacaatggttgcctgaagcacccgcctatgaatctgggattcaaacggcggcattgggcaatccgacgcttcagtgctactatcggcctgcgattaccgttaccttggattagttgacaattcagcaaatcttttttatactttggaagtgttgggatatacgcaacgaactgacggagacaggaacgcctttctagactgagagaaggtgccgccattggttgacgtgctccccaacatcacaaacaattcaataaactcataaagaggttaacgactaacatcgttgcaatcaaggtggtaccgcgcttttgcgtccttgaaattgcagcggtgttttatttttttgaaggagcaaacatgatgaaaaaactaaccagtgcgcaagtgcgccaaatgttcttagatttctttaaagaaaagggtcatgatgtcgaaccaagtgcatcgcttgtcccagatgatgatccgacattattatggattaactcaggggttgcgaccctaaagaagtatttcgatggtcgcattgtacctaataatccacggattaccaatgcacaaaagagtattcggaccaacgatattgaaaatgttgggaagactgctcgtcaccatactttcttcgaaatgctcggcaacttttctgtcggggactatttcaaagaagatgcgattccatgggcttgggaattcttaaccagcgacaagtggattggtttcgatcctgaaaaattatacgtgacggtttatcctaaagatcaagatgcgcaccggatttggcatgaaaaagtcggtttgccagaatcacacatcattgaagttgaagataatttctgggatatcggtgaaggcccctgtggccccgattcagaaattttctacgatcgtggtcaaagcttcaacaacgttagcgaagatgatcctgaaaactatcctggtggcgaaaacgaacgttatctggaagtttggaacatcgtgttctcagaattcaaccatttaccaaacggcgaatatgttgaacaaccccacaagaacattgatacggggatgggcctcgaacgacttgtttcagtgattcaagaagccccaaccaactttgaaacagatttattcatgccattgatcgaagcgacagctaagatgagtgaccacaaacaatacggtcaaaatgcagctgatgatatttcattcaagattatcgcagatcatgcgcgggctgtgacgtttgcaattggtgacggtgcaatgccggccaatgaaggtcgcggctatgtactccgccgtttaattcgtcgggccatcttaaatggtaagaaactcggcatcaacgacgctttcatgtacaagttagtaccaatcgttggtgaaatcatgcaaagctattacccagacgtattagcacaaaaagaattcatcgaaaaagtcatccgttctgaagaagatcgtttccgtgaaaccttgaatgatggtttacgtttattgaaccaaacgattgacagtgtcaaagctgctggtcaaagtgaaattgctggggcagatgctttcaagttatttgatacgtatggtttcccaatcgaattgacaactgaatatgccgaagatgaaggcttaacggttgatcaagctggtttcgaaagtgaaatggcacaacaaaaatcacgtgcacgtaatgcccgtagtgatgaacaatcaatggggatgcaaaacgaacttttaatggatatcaaagtggaaagtaccttcactggttatacaacgcttgaaacagaaagtaagttaagcgtcatcttacaagataatgccgaacaacaaacgattaagagtggtacggcgcaattaatctttgaccaaacaccattctatgctgaaatggggggccaagttgctgatcaagggatcattaagaacctagctgggcaagtagtcgctaaagtgactgacgtgcaatacgcaccaaacgggcaaccattacacaccgttgaagtgctcgaagaaatgattagtggtgtccactatgtcttatcagttgatccaaccttccgcggtggcgtcattaagaatcacaccgcaacgcatttattggatcaagccttgcgtgatgttttaggcgaacatacgcatcaagctggttcattggttgaacctgactacttacggtttgattttacgaacctcggtcaagtcacaccagatcaattagccactgtggaaaaaattgtgaacgaaaaaatttgggctgcactacctgtgaatactgttgaaaccgatattgaaacagctaaacaaatgggggccatcgcactctttaccgaaaaatatggtaagacagtccgagtggttcaaatcggtgattactcaatggaactttgtggtgggacgcatgctgctaacactgctgatcttggtctattcaagattacgagcgaatctgggattggtgccgggacgcgccggattgaagccgtgacttcaaaggcagccttcaagtatttgaatgacaaacaagccttattaaatgaattagctggtgaattgaaagttgctcaaaccaaggatttacctaagaagattcaacaattacaatctgacttaaaagcagaacaaaaagaaaacgaacaactcaaagcaaaatttgcccaacaacaagctggcaatgtttttgaaaatgtcgaaacagttggtcaatggcgcttagtggctgctgatgcaaaagttgccggaatgaacgaattacgacaattagcggatcaatggcaacaaaaacaaatttcagatgtcttagtgctcgcaacagttgcgggagataaggttagcttgattgtcgcggtcgcacctgatgcgattaaagcggggattaaagccggtgatttgattaaacaaatcgcaccactcgttggtggtggcggtggtggccgtccagacatggcccaagctggtgggaagaatccagctgggatcgcagatgctttggcagctgctaaaacagctttagcgaacgcttaacttataacgggattgtcgtcaattttttattgattgcaatcccgttatttttttgttctttttgttaatcaatttagcgaaatgtgttatagttatctctcatccgcattctgctaagagaggggagagttgtactttgtcctgttttcgagtagaatatggttgtataagtagcgaaaagttgaggtgttgagagatgaatctagataaaacagtccattttgattttggtaaaaatagccccaagaatgttcatgaaacattaacgacggtctatcagacattagaagagaagggctacaacccaattaatcagattgtaggttatctgttgtccggtgatccagcatacattccgcgctataatgatgctcgtaatttaattcgcaagcacgaacgtgatgagattatcgaggaattagttaaaaattatttggataaggaaacgacgaaataatgcgcttaatgggatttgatgtaggatcaagaacggttggcattgcgattagtgatctattgggctggacagctcaaggggtcgagattattcgcatcaatgaagatgaatcagaatttgggttagaccgcgtcaaggaattggttgcagaacatcaagtgactggttttgttttggggttacccaagaatatgaataattcgattgggccacgggcgcttaaagcgcaagaatacggggcaatgctgagtgaacttttcccagagattccggttgattacatcgatgaacgcctaacaacggttcaggctgaacgcatgttagtggaacaagcagatacgtcacgtaagaaacggaagcaagtgattgataagcttgctgcggtgatgattttgcagaactacttggacgcgcacggtcgcttaacacaaggctaataaataaaacaattaaggagttttgatgaatgactgaagataacaagaacatccaccaagatgaagaacaacaaattacactaatcgacgaccaaggtaacgaggaattataccaagtgctctttacatttgattcagaagattacggtaaatcatacgtgctattgtacccaacaagcgctgaagaagatgaagaagttgatatccaagctttctcattcacatcagacgatgcaggcgatgccagcaaaggtgacctattcccaatcgaagacgacgaagaatgggaaatggttgaagaagtactaaacacatttttggcagacgacaacatgaaataagtgcgttcaaaccggttatactttgaggactagcatagtcccgtgaatgagcgacgaagtcgatcgtttgcgggacgtagctagccgcagaagtatggtttgaaaagtacgttaaagaaaagaagagcgtcatcaacggggaacttctgagcatttgcctaacttagcgaattggcgatgcaatcgccgatttgataagtgtagcaaagcacaggaagttgttgatgaaagcacgttatcaccatctatttcaaaaagggtcccgatagcaattaattaaattgcagtcgggaccctttttttatgtggagaaggtgtgggttgaaatgtgctttttaaagctgactcttgtgcttagcttcgtatcgcaaacgaccgactttgtcggtcattcacaacactgtgctaatgctcagagtcaacccgctttaaacgcactttaaacgtgctcttacaggcatatttctgcgcttaactaaatttgccaaatcagcgattacatcgccaattcgtcaaatccagttaatgctcaaaatatcaccgcctgtagtcgcactctataacaatttcttcgctttttccgtgttaataaaatgcaatttagcgaattcgcctaggtaatcgatgccaccttgtgcgagtaaatctgcggcgatttggttaactgcttgatgattgccgagcggaatttggcggcccgcttttttagacagttcaagcattgataggttggcttggtggcgcgcaatgattgaagcggcagcaacggcgaggtgaaattgttccgccttggttgagaaataaacgttctcgcgtaaaacaaccggttcattcttcaaatagttgtagtaaatgccgcgtggttcgaattgatcaatgaggatgccagcgggtttttcgggttggattttttggaggactttgaggagtgcgaaattatggctgatggccttcattttttcgatgttcattgtggcgtgtacttcattgtatttcggtggcatgatgttgacgatgtgataggggagtttagccatcatcttgattgccatctgatcgatttgtgcatcggttagcgttttggaatccgcgacacctaggctattgacgaacgccagattttcttggctgacatagacggcggcgatggtcagcggaccgaagtagcttccgttaccaacttcatctgagcctaaaacggaccatttggcaaaatcagctggtaaaacatcgcctttggcggctttaggcttagtacggctagcagattttgctttgctaggggtagcggtgccccacttagcagcttctcgttcggcactagcgccttggaaaagtactttgccagatttatagccggtaatgcttagtccattggcttggtgcgcaaaaacggcccccggcggtagttgacggttggtcggataatttttttgaatagtagttaattgtgagggtgtcactttaatgactgcttgcatacgattggctccttaatgagtggcaaatgaagagattcggagtaaaattgccactttcccttatttcatgataaaatagttcagttgaactagcaaataaaattagagtgcgactgcagatggtcatactctgaggattagtagcataccgtgaatgaccggcaaggccgatcgtttgcggtatgaaactaaccggaagagtatatctgcaggagcacgttaaaaaaagagtgcgacagcaggcggttatattttgagtattaactggatttgacaaattggcgatgcaatcgccgatttggcaaatttggttaagcgcagaaatatgcctgcaagagcacgtttcaaaaatcagagtgcgcaataagctgggtatcttctgaggattagcatagactcgtgaataagcgacgaagtcgattgtttgcgaggcgtagctaaccggaagaagatggcttatggagcacgtttcagaatactttatccaatcaatcatacacacatccacgccacaaaacgcgtatctaaggggaactcatgttaagtctaattattatcttaatgctgttatatgccatttacacaggggtcagacgggggtttatcatgcaagccgtctacacgattggctactttatcgtcttttggattgccaaagcgatgagccaaacactagggcctaagctaagtttaatggtgccatacccatcggcaactgaagacagctattttgcatttttccaaaagagtatcgggttgtcactcgatgatgcgttttatatcggcgtcgcctttgtcctcgtgatgtttatcggtggcttgttggtgcgcttcatcggactattgttgaattcattgacttatatgccaggtttgaagcaatttaacaaggcagccggtgggctcttgagtttcttggtcgtttacgtggggctctttttgctcctctacgtgctggctttagtgccagtcgatggcttacagaagacattggaaaactcgacagttgcgcgcgtcattgtcttacacacaccagtcctcacctctcaagtgacgagctggtggattgctggctaaaatggatagtgcagttggggctgacggaagtcgccccttttttagaaggagttaacttaaatgaatcataaaatattacaaacactagaatacgataaaattaaacaaatgcttcaaggccatgccatcacggcgtttggtcaagaacaaatcacacaattaacccccgctaacgatgcggaattgattcaagaacgcttggaccagaccaaagatggggtcgatattgaacggctaaaaggtggcattcctttgccacagttagataatattcgtccgcacttgaaacgaatcgaaatcggtgcgactttaaacggtaccgaactcgcgcaagttgggcgggttttgcgcgcgacttctgcggttgtgcgtttctttgatgacttagaaaaagatgaattaaccttaaaggcgttgccagacttagttgcccaattggtgactttaccacaactaactgaaaagattagaagttctgttgctgatgatggcgccgttttagacacggcttcaaccaagttgcgtggcttacggactggtttaaaacaattggaaggccaaatcagatcgcggatggcaagttatacacacggtgctaaagctaaatatctgagtgatccgattgtcacgattcgaaatgaccgctatgtcattcctgttaaacaagaataccgtggccaattcggcggcgttgtgcatgatcagagtgctagtggtcagacccttttcatggaaccacaagccatcatggaattgaataaccgcttgcgccaattacaaattgaagaacaacaagaaattgaacggattttggcggaattatcggaagccatcatgccagaacgccacaatattttagccaacgctgaattattggggcaactcgatttcgtcaatgctaaggctcaacttgctaaagcgttggaggccactgaaccgctgattaatttagaaaaccatgttgaactcaaacaagcacggcacccattaatcgacccagctaaagtcgttgctaatgacatcgcgattggggcggattatcaggccatcgttgttacgggtcccaataccggtgggaaaaccattacgttgaaaaccttaggcttagtccaagtgatggcccaatctggcttatttatcactgcgcgtgaggagagccaagtcggcgtcttctcggatatttttgctgatattggtgatgaacaatcaattgaacagaacttgagtacgttctcagcacatatggaaaacatcattcagattctccaacatatcgacgatcgtagtttggtcttgctcgatgaattgggggcagggactgatccacaagaaggggccgctttagccatcgctatcttggatcaaattgggattgttggcgctgatgtcgttgcctcaacccattatccagaattgaaaatttacggttacaatcggccacaaacgattaatgctagcatggaattcgatgtggctaccttacaaccaacgtaccgtttattaattggggtgcctggtcgtagtaacgcgttcgatatttcaacgcgcttagggttaccaagctcaatcgttcaacaagctaaacaattgatgaacgatgaaagccaagatttaaataatatgattaccgatctcgaaaatcaacgtaaggcagccgaaacggaataccaagctttgcggcatgaattagcagaagcgactgacttgcatcaacagttatcaactgcttatcaacaattcttcgaagaccgtgaaacagaaatgacgaaggcgaaagaaaaagcgaatgcgatcgtcgaaaaagctgaagttaaagcagacaaagtgattaccaagttgcgggatatgcagatgaatcaaggcgcccagattaaggaaaatcaattaatcgatgcgaagtcggaattagggcaattgcaccaagaaacaaccttgaagaaaaacaaagtattgcaacgggcaaaacgacgtcaaacccttaaagaaggcgatgatgttttagttacttcatacggtcaacgtgggacattagtccggcaaatcgatgccaagaactgggaagttcaaatgggcattatcaagatgaagattgctaacgaagaccttgagaaacaaaaagtcgttgaagataaccgacctcaacggcatgtgacaactgtcaacagcggtggagcgcggtatgttaaagcccaacttgatttgcggggcaaacgctacgaagaagcaatggctgaagttgatcaatatgtcgatgcggccttgttagcgaactaccaacaagtgacaatcgtccatggaaaaggcaccggtgcaatccgccaaggtgtccaggactacctaaaaggcaatcgccaagtcaagaaatacgaatacgccccagcaaacgcaggcggcaatggcgcaacaatcgtaacattcaaatagagtgcggaagcaggcggttatacgccgaggattagcataggcagacgaatgaccaacttgttggtcgtttggctggtgtagctaaccggaggagtttgcctgctggagcacgtttacgcccccaatccaaccagtcctttctggttttgattgggggtgtttttttaggcttgttaaattaaacggggataaaataatccgtttgtaacgaataataagcgagttaagttgttatttacgccatataggagtatcatgataaataatatgttttgtacaattgaatggagggcgaagaataatggttgaagtattaacagataaaaattacgaagaagaaacaaagagtggcgttgtcttgacagacttctgggcaacttggtgtggtccttgtcggatgcaatcacctgttatcgaatcattggcagaaactaacgacaaagttaagttcagtaaaatggatgtggatgctaatccagaaacgcctgctaatttcggaattatggcgattccaacgttagtggttaaaaaagatggtcaagttgttgaaaaaattactggcttccataataaggaacaactagaaacgattttggcacaatataccgactaattatgaaaacacctactatttagtaggtgctttttttatgtgacagcgtgtgacaaaaatgttagtggttgtttaataaacgttgtggtaactttaatgatgaacaaaatgatgaaaatcaaaaagagagagaaagagatggtgaaaaaatgggtcaaaaaatacttaatttttggaataaaccggccgtcaatttcattggcaaaaccataatttattttgttattctgctaattctactttatttatatgattacagtggtatcggtagtcctaaatttatctacaatgaattctaatgaaggagcgtcgttaaaatgaaaaagaatatcattcaacaaattgatgcgattgcaattgaccaaccacaaactgtggcttatcaattaggcacgacgcaacacacttacgccgacttaaaggctgcttcagaccggattgctcatttcattcaaagccaagacttgccagctaaagcaccggtgattatcttcggtggtcaaaacttcgagatggtagcaacttttctaggtgctgttaaagcaggccatgcttatattccggtggaacaacattcagatccagcgcggattaaacagattgaatcagtcgcaacgccggctactgtcctatcatgggctggtgaaacagcgattgatgttaatatgcccgttttcgcagaacctcaattgacagatgtgattgcaaacggagcaaccgattatgatgctagccaaagtgtgcaagggaatgagaatttctatatcatcttcacgtcagggacaacagggttacctaaaggcgttcaaatcagcgaaagcaatttacaaagtttcgttgactgggccaacccagctttcaatgttgcggataacagccgcgttttaattcaagccccatactcattcgatttatcagtcatggatttatttcccgggttatgctcaggtgcaaccctcgtcgttttagaaaaagctgtgacggacaacttcaagacgttatttgaagtcttgccaactcttaaggtgaacgaatgggtttcaacaccatcttttgcagaaatctgcttattatcaccaacatttgatagtgaacatttcccagaattaaaacaattcgtcttctgtggggaagaattaacgcatcaaacagcaacaaagttaatcgaacgtttcggtgatgcgcaaatcttcaacacatacggcccaactgaagcgaccgttgcgatgacgagcatcgaaattacggcggaggtcttagcgacttacgaccgactcccaatcggctacacaaaggctgatactcaaactgtcgtagtggacgaacagaataatccagtcgcagttggtcaacctggtgaactcttaatcagtggcccaagtgtttcaaaagggtacttgaataatcctgaaaaaacagctgcagccttcttcgaaaaagacgggcaacgcttctaccattcaggcgatttggtcacccaaaacgaagatggcttgctcttttataaagggcggaccgacttccaagttaagatgcacggttaccggattgaactagaggaaatcgaccaccacttaagccaattagcagccgttcatcaagcatgtaccgtaccgcgctacaacaaagcccatcaagtcacccaattgattgcctatgttgtgccagcagacggtcaagaagcgggcaatgatttaacgaagacgttaaaagcagaactcgctgaaaatacgatggactacatgattccgcaacgatttgtttatcaagaaaaattaccattatccgtcaatgggaagattgatcgtaaagcgttgattaaagaggttaatggcaatgcctaatttacaaccgtacgcgaatccgaactactttctcattctaggtgcggcgttaattccgttagtgattggcttacttaacggcaaacgttggcatgtttatgagacacttgtctcactgctctttttgatcctaatctttgacggggataaggttcaccagggaattgccttgattggttacgtcctgttcgaaggagcactgatttggggatacactgtctatcgtcaaaagcacaataacacctggctattcgatctggctgttatcttagcgattatgccgctagtgattgtcaagttcgtgccattcttaaatccgggtagtaattcaattcttggcttcttggggatcagttatctgacatttaagtcagttgggatgattatggaaacccgtgatggcagtattaagaaatttgaaccatggttattcttacaatttatgctatttttcccgacgatttcatcaggaccaattgaccgttatcgtcgtttcaaaaaagattacctaaaagttcctgatcgtgaccattatctcgacttactgggcaaggcagtccacaacttcatgttgggctttgtgtataagtttatgctcggttacttattcgggaccgtgttactccctaaagttgcgcatttagcaatggcgagtcgcggtgggttccttgatatctcatgggggcttgttggttacatgtatgtttacagtatgtatttattcttcgattttgcgggctacagtttattcgctgttgcaacaagttatgtgatgggtgttgaaacgccaattaactttaacaagccatttgcatcaaccaatatcaaggaattctggaatagatggcatatgacattatcattctggtttagagattacatctacatgcgcttagtgttcttcttgatgaaacataagattaccaagaacaaggtcctcattgccaatctcggctatttaacactcttcttattgatgggcttctggcatgggttgacatggtactacattgtttacggcttgttccacgccatctggatcatccttaccgatgtctggttgcgtttcaagaagaaacacaaggatcacattatcagcaatcggtggacgaactacttagcaatttttgcaacgtttaacaccgtttgtctcagttttctaattttctcaggctttttggaccggttatggttccactaagacctacacactaaaggagcgatttaatcatggacgtagaaaatacagtagtagaaattttagcagatttaacagggaacgacgatattaaagacgatatggatatggaattattcgaatcagggacattagattcaatggcaactgtgcaaatgttacttgaattacaaggccaattagatattgaagtacctgtttcagaattcgatcgtgaagcatggtcaacacctaacaagatcattgctcgcgtaaaggaattgcaataaaatgtttaaacgtttatggcaaattttcggcccggttttagtggccggtctctgcttaacagccttattactatcacctcttcgattaggacgacctagcgaaaagacgttgtcgacagcggcgacgtcattatccgccaatgtgctaaaaggggaagccatcaaagatgctgcatttaacgacaactacattccgatgattggttcatccgaactatcccgaatggacgcgttacatccatctgttatggcaaacaagtatgattggcaaaataagccattcctactaggggcaccagggactcagtcattgacccactttttatcacttcaagcgactggtaatcacttgaacggtaaaaaggccgtcgtcgttatttcgccacaatggtttgtaccacaaggggtaaaacctgagatgttcgatttcttctattcaccactacaaaccagttatttcttaatccacgcgaaggattctgaaagtacgcggtatgcagcgaaacgaattctagaactcacaagtgatacaaccaacggggtaatgcgggatgcattgaagaacaaagctttaggcatacctttaacggagacgcaaaaagtatacattaataatgtgaaacgcccagcgttacaacatcaagatcaactcttcagccaattattcattcggggtcgtgaacgcgaattgcgtaaaggcttgaaggtgttaccaaaacaacctgataacatgcaacttgatcaagtcgcaacggaattaggacaaaaagtaacgggtgataatccgtttggcattcaaaatagtttttacaaaaaacgggttaaacccaatgttggtaaattgaagggtgaacaaagtcactttaactatgaaagttcacctgagtttgctgatttccaattgatgttagattacttcgcagcccataaagtatctgttcaattcatcattccacccgttaatgcgcgttgggccgcttatacagggctctcacaagcgatgttgaatcgttttgataagaagattcaatatcaattgagaacgcaaggcttcaacaacattgttgatatgactaacgacggtaatgaacaattcttcatgcaagatacgattcatcttggctggcgtggctggttgaaagttgatcaaaaactccaaccattcatgagaacgaaaaaagcaaaaacagtgcactatgacatgtcaaacgacttcttaagtcgcgactggcaaaacgtcagcggcaataacgtccatgactttgattagagtgagacagagccggttatcacttgaggattaacacgtttaatatgctaagtattcaaaaagggtaggaacaaaatttaattttgttcctaccctttttttatagcacatgcttatctgtgttttctatgcatttctcgtcgacttggtaagtctgccacgcgggttcttgtgtagtgtggtgtttcttcagaagttggcttgttttctggttccaccggttcaggaacaactggtgtttctggaacggattctggttctagtgtgggagcagccacttcttcaggggctgcttcaacaggttgtgtcatcacaggtgctggttcttcttcaacagattctgattcacttggtacagatgcgacttgtgatgcatcaaccgttaaatgaatggcttcgactgcttcgtcttcaattggtgcttttgaatctgtttggacgaaaatcgttacgttttttttattttcaatggttgctttggcttcagtcacaatccgcaattgttgttcgaggatttgggcaacgaagccggcttctaattggaagtcaggagtatcgaaatccgcaatccgtgaagcgacaatcgggcctgttaattcgaagaagtattgttccttcttctgtttcttaagactgagatggccgaagttgatttgttcgaagaaggcacagaggtcttcgaaagaatcgagtgggaattgcaaagcgagttgcttaccggcccaatagctgatggcgtcattttcggccccaagaattgatggtaacaagatatcccgtaatgttgcctgtgtcagatatgatgcagtttgtggattttgggcgagttgttcatagcgtgattgagtcacagtggcactcctttatggttcgttttttataagtactcctattataccgcgaaaactctttattttttataaaaattaacgccaactgtgaattgccggccgtgcccgttgttttagttgaattttgcaccgaaaaaagagaaaatagaagttacgagtgtatcctgaaatgaaaagagaaatctaatatgcaaaaacaacccattggttttatggattcaggtgtggggggcctaaccctcttaaaagaggcgcttaaacgtctacccaacgaagacatggtctttatcggggatcaagcgcgcctaccatatggtgaaaagccggcggaaaccgtgcgcaaatttgcgtggcagatgaccaattttctacgggggcaaaatattaaagcattggttgtcgcctgtaataccgcaacggcggccgccttacctgatttacaagcgcaattgacgattcctgtaatcggtgtgattgcaccaggtagccaagcggcattggcaacgacccgtaatcggcatgtcggggtaattgccacgaccggaacgattaacagtggcgcatatgcctatcaactaaaggcactcaaaccggcgacacacgtcacgagtttggctgcgccaacttttgtaccgatgattgaagcaaaccaattgagtggcgaaactgtgcaaaacacggttgacgaaaccctcgcgccattaagcgggacgggaattgatacgctaattctcggctgtacccacttcccattattaaccgcggcgattcaaaagacagttggaccggcagtcacgctggttgaccccgcgcatgccgctgttgatagtttgattcaggcattacaagatcgcaatcagttggtggccgatgcaacagctgggcaactacacacctatacgaccggatctgtaaccaatttcgaagcaatcgcgcgtcaatggttagcaatcccaacccttgaagcccaacaagttatcattaaggaggaaaaaaacgatggtccgaatgaataatcgtgctgataatgatttacggccagtgcaagtcacttggcgttttctaaagcaacaacccgcttctgttctatggcaacgcggtgataccaaagtgctcgctgctgttcaacctacagaaggttccttgcaagtcaatggcaatggcataacagcgcaccaattagaatggttgcaaacgacattacgccccttattggcaaccgaagcactcactatcaccgtaacctgtcttgaagatggtggcggcttattagcagaactcttcaacgctgtttattgcgcactaaccttattaccaaaaggcaaaggccccaaacaagtcgctgcagccgtcacagcagcgatggtcgctggtgagtcactcggtgacccagacgccgcggaaagcgacctagcgactagcttggtgacgatggtggccacaccgcaggaacaaatcatcgcccttgaactcggcggacaacaagcagtcaatagtagtgaattcaacgaacttattttacgtgcgagccaaggtgtgacgcgaaccaatgatcaacgtcaagccagttttgaacgcgccgttcaaccgaatatccaagtggctgataccgatgaacaaacaatcgtgattgccacgaagaatccaggtaaggcccgcgaattcgaatccgtcttcgcagcggaagggattcaaatcaaaacattattagattacccagaattgccaaacattgatgaaactggttcgacatttgaagaaaatgctcgcctaaaggcggatcaaattgcagcgatcttacacttacctgtcttggcagatgattctggtctaatggttgatgaactaggtggtcgtccaggaatttattctgcacgcttctctggtgatcataacgatgccggcaacaacgcgaagttgctctatgaattaacgggtgtgcctgctgaaaagcggaccgcaaccttccatacaacattggtttttgctaaaccagaccgaccagatgaagatttagtcgttgaaggtaacgtgaagggccaaattctaggtattcctcgtggggataacggcttcggctatgacccacttttctacgtgccagaattagatgcaacgatggcccaactcacggtggaacaaaaaaataaaatcagccaccgcgcaaaagcaattgagaacctagaagataaatggaaagaatggatcaaaaactagcgtgcgacggcaggatcacgtttagatttggctgatgtagctagccggaagaatatgtcggaagaagcacgtttcaaaaaaacaacgccccttggcgccgaaaggactgtttagtatgcgttttgttgttgtgagtgatagtcatggtgatcgcgatattctcgtgcagttagtggcgcagtatcaagatcaaccagtaaccatgttacattgcggggattctgaattaacaaccgatgatcccttgtttaaccaaatgaccgttgtgcaaggcaatatggatttcaatggtcaatttccagcacaagttgttgtcccagttgcaaatgaacgaatcttcttaacgcacgggcacttgtatggtgtaaatggcgatttaatgcggcttttattagcggcccaagaaagccaagctaatctcgcgttctatgggcatacacaccaattggcctgtgaaatgcacgaaggtgtgctgctcttgaaccctggcagcattgcccaactacgggggcagtttcgtgacttgaaagggacatacgccgttgtagacgtcacacctgaccaatatcaaatccagtactacaatcgtcggttcgaacccgtttcgcagttacactttacatttaaacgcgcctaattctaaagactatccaaagtttagtagctatggatggtcttttatgtttgctctttgttacaatctaaaagtagcattagtttattggaggccaagtgatgatttcagatgcattttcgaacttattattagaaaataaagaacacttcttaattcccggtgaggttgttgcgagtgttcaagaaagcaactccttggaacatgcgtttattctactaaccacggtgaaatattcgagcattcccgtcttagacaaccattcgaagttcaaagggatgttgacgatgccgttaattaccgagacgatgctcggattgaataacctcagtttcgaaaatttgcggaagctgaccgttaaagatgtcatgcaaaccgatgtcgtgacgattagagatccatatgatattgaagaaacgctccatctcttagttgatcacccctatctgcctgtgatttcggatgaaggggagttcacagggattgttacccggcgcgaaatgatgaaaagcttcaaccgagtagcccataatatcgaaaaagaataccaaatcgagccaataaccgcagaaacaacccaaaaaggacaataagggttaaaaaagcgtcttccagacaccaacgaataatgtttggaagacgctttttgttttggactgaatccagcttaattactggtatatcaacatttgtaagcaaaattaagttagacgtaatgactttaaaaaatccatgatagtaggtcataactcatgagttgtgaacctcttatatcgttacatattgttcttgggtaatgatggttagatgactaatattcacccctgcataggcattcttgggagtctagcctagggggaagtagtgataccgtcaaagttatgcctgatgaacatagtcaaaatatcgaaaaattatcatgtaacaaagttttaaaggcattagaactgggaggaaatttgatatgcaaaagagagtcgtccatctaattttagcaattattttcttaaccactacaatcgtacagtcatttggtagcgcattagtggtggctgtgaataaggagacggtgacagccaacacgacttctaagattgtgaacccacgaagcgcaattgaaggcgcgagctcagtttctgaaagcttagccagttcgttgcaatcacaatcgacaagcagtgcttcaacaagctcagatagtaagtcgagttcaaagagttctgattcagaatcgagttcaagtatttctgagaaaaaggaaagcgttaaatcgaacacgagtaaatcggtgattatttaaccacgatactggctttcagatttgactgatccgggcagtgaatatccagacttttcgattcctttatctggtcaaaacaacgttacaacgattgaagatgtagctaacgtttacaatagttcagcaatgatttcttcgtcttgatttaagaattgatcgccagctttgatttctgtcactttaattccagcaagtgagcgttcaatcaaggcatccacatcgatgcgttgttcgtagaaccgggtcttatctaagttaggccgggtcttcggtgctggtggtgcaaaaatggtacagcaatcttcgaatggcatgattgataattcgtacgtatcaatatccttcgcaatttcaatgatttcattcttatccattgtcgcaactggccgcacgattggcgttgttgtgacatcattgatagccatcatactttcaagtgtttgtgaggccacttgaccgacagattccccattaaaaatggctaaaccttggcgcttagcacggatttgatccgttaaacgcaacatcatccgccgttgaatggtcattaagtaaccttctggcacagaatgcttcacttcttcttgaatttccgtgaatgggacttcgataaacttaatcccaccaacgtatggcaccaatttcgccgttaattctttggccttattcaaggcattgtcgcttgtgtatggtgggctaaagaaatgcaccatttcaatgtcgacaccccgtttgagcgttaagtaacctgctactggtgaatcaatcccaccagataacatcaacattcctttaccggcagaaccgactggtaagccaccagccccttgaatcacttggttggttaagtaaatcgcatcttggcgaatttcaacccgcaaagtaatgtcaggttttttcatttgcacttctaattcaggtaattcatctgataagtaaccacctaattcgcggttcatatcattcgtatccaagaagaaattgtgatcagaacgacgtgtgttaactttgaaagacatcccaggtttgccgatttctttcatcatggcaagcgccatttctttaacagaatctaaatcacgatcaacttggatacttggtgagaagttttggatgccgaagacgtgacggagacgttcgataacgccttctgcatcgtcgccgtttaaaacgatatgcatccggtcacgtttagggtgaatccggagttgtttatactcgtgaagcgcctttgtgacgttcccgtttaaccgaccgataaaatcgttccggtttttaccctttgtcgaaagttcgccgtagcgaaccataatttcagtgtattgcatgcctatctccttttagatggtagtttacgaattaatttttttgaagcgttcgttaatttgatcgaacgctttgatgaatgcatccgcttcttctagcgtattgtattcatcgagggatacccgaatggcgcttgtcgcaattttttcattgacgtgcattgcctttaaggtactagattcagtccctttcttcgaagagcaagcacttgtcgttgaaatatagatttcgtgttcttcaaacgcatgaaccgttgtttcaccgcgaacacctttaattgcgaagcacaaaatatgcggcgcaaaatcaggcgtcagttgtgaaaacataaccgttttatccgattgactgatatggttaaagagtcgttctcgaatagctgcttggcggtgtactttttcagtctcatcggtcaataacaaacgtaaggctttggccattgccgcgatggctggcacattttcggttccagaacgtaaatcatgctcttggcccccaccggttaaaagcggcgctaaatgacgcccgcgtttcttatacaaaatcccagtcccccgtgggccgtggaatttatgccctgataaggtcacaaaatcaacgcgttcgttgaaaatcgcctcttgaatgcctttgccaatcccttgaacggcatcaacgtggaaatgaatattaggataatccttcaaaatatcagcaatggcttcaagtggctgacacgttccgatttcgttattaatggccatgatcgaaactaaaatggtatcaggccgcaatgctgcttttaagtcagccggatcaattcgaccaaactgatcaacgggtagataagtcacatcaaagcctaatttttccagttgctgcatggatttaatgatggctggatgttcaaccgatgtcgtaattaaatgtttcccaaacgcccgtttttcaattgccgtgccttttaagacccagttatcgccttctgttccaccgctggtaaagaagatttcatcgtggtctacgcctaataaatcagcgatttgttggcgtgattgttctaaaatatgaaaggctttttccccaatcacatgtaaactagaggggttgccgaagaactgttcactaaccgcttgataggtctgaagtgcgcctggcgcgattttagtggtggcactattgtcaaaataaatcatatcgatccttcttactaaaaattagtgttttaacgttgtacattatagcaaattggttattaaagacaaccaattaatctttaacaaaacaaatccgagacaaaatgcgtcttgtctcggactggtgagcatctaagtgactaattagttgcgtctgacttttggtcgtaataggccttttcaacttgtgtgtaagcacctggatcaaccttttcaagggccgttgccaataagtcgacagctttagcatagtcgtattcttcattaaaaatagtttggaccgtcacacaggcttcctggatggcgggaaaatctgcacgatatcggttggcatattgtaacaattgctccgtaatcaatgcactgtcaattaaggtatccgtcttggccttcaattcatctaaatcctcttgaacgagaattaattgcttcgcgatatcgtctaaattaatcttaatttgattcaaatcatgatcaagtttttgaatctcatcagaaacaacgaagaagaaatccaaatatttctgttgtaaaccaggtaaattaaccttttcaacagcgcgcttcaagttacgtagttcaagttcaaactggcgtaagttttcattagcgacgacttcgccttgatgcaaactagcaacctgatcatgaattgcttgttgtttttcttcgatgacagttagccgttcgtcaatcccggtcaaatcttcagcaatcgccgtgtaaaccgcttcgtggttggcaatcttcgcttggtgcccttcaactaacgcctgttcttcaccaatttgcttttgtaattgtttggcgcttgccaactcaccatgtgtgagtgcataactctgattgagatgatcgagttccaataatagctcatggttctgacgttcagcatgttgcacgaatgtcgcggtggttggcaattgcgtcgcgactgccttcttggcagtcatctcagcttctaattgatcatataattgatcaatgccacgtgcaatttcatcgttattggcttcaaccgactcaatggccaaatcacttaacaaggtagtgctcttatcaagttgatccattagttgttgttgtttgacttcaatctgccgatcatcaaattgataatgttcttttaacatttgatggtaggtatcattaatttcaaccagttgttcgggaaactcgttagctaattcgttatagcgctttggaatccgttccatctggtcttctaattgcgttgtttcagtaattaatttctgcaaaatggccttagcccctagatggtcgccggctgttgttagttcgttggcttcgtcaaaatccacctctaagcgacctagcgttgcttcaagcgcatctaatgcaggtccaaacgaaaaactcttagtcaacaaacgtttacgtagttgttgatattgttctcgtagacgctgaattttttgacgtgtatcggcttcattggcaagtagattttctaaagcatcttgaacatccagtaaatcttgatccgtttcagtcaagtacgcccgcaattgtttgagaatccgtgcaacctgaatgaattggtatttggcattggccgtttccgcatcaaaaagatagccttcaatcgtgctgaagttatggttggtaatctgctcatattgtttttcccaacgatcaaagttttgcaaactttcgcccgtcaaatgtaacgaccgtaacttcgttaagcgttccggaatcggcaacgccattaagtcgcctttatgtgcttctagttgtttaatttgtttgataaaataacgttgataaaaaacaacacttaggtagccaatcagtgcgacgactacgattccaatgagaatgtaaaacattcaaagacacacccttttacaatttaaatcagatttgttagtccgttcatccacttcaattcattaaactatgtttgattatagcatgaataagataacggttcagcaataattagcgataaactttagaaaagctgcaattttaatctgaatttgcttgacgttgccgcacaccgtacgctatactagccattgtgtaaaataatgcagcagtaaacggtaaagccgtcaacagttcatttgcccagagttttggttcaattgtgtaaccttgcggctgcaaaggtgaagattgttaataagtgaactgaacgattactaagtttacatcggattattttactccaaaacatttattggaggatttttttatgtcacgttatacaggtccaaagtggaaactttcacgtcgtttaggaatttcactatcaggcacaggtaaagaacttgctcgtcgcccttacgctccaggccaacacggtaacgaccgtcgcggtaagatttcagaatatggtatgcaattgagcgaaaaacaaaaacttcgtttaatgtatggtttaacagaacgccaattccggaacttatttgctcgcgctggtaaaatccgcgaaggcaagcatggtgttaacttgatgatcttgctagaacaacgtttagacaacattgtttatcgtttaggtttagcaagcactcgtgcacaagctcgtcaattagtaaaccatggtcacgtaactgtcgatggcaaacgtgttgatattccttcatacgaagtaaaacctggtcaagaaatttcaatccgtgaaaaatctaagaaccttgtaatcgttaaggatgcaatcgaaggcacagttggtcgcccttcattcgttagctttgatgctgacacaatgaaaggttcacttgttcgtttaccagaacgttcagaattagaaccagaaatcgacgaagccttaatcgttgaattctacaacagataagcagttatctgttcaattaaaagagtcagacttaggtctggctctttttttgcgcatttaaagacgcgtgcctacttagcacacgcgtctgatttaatctatttagtctgtaccaactcatataaaggcaccatcttcatcaaggtcgtttgaatatcggccatgagagcttcgggttggtcgaataatgggttgtctttcagataaacttttccgaggagccactccccttttttggtcttagcaaacttatcttgaatcagtttcaagttctccgatgacattgggaatttttgcttggtcatgtgatcgtagcttaaatcatagtcggcaaagtcccttaagaggctttctgtttggcttgccaataacggtgcgtaatccgtcttatctggcatctcagccattaaagcaaaccaaacgaagatccgatcatcccaaaaaccgacttcaaagtgcggcatcatcttatacccgcgtgagctctcactaagtgccatccaagtattcattggtggatttttgaagcggcgtaaatgcttggcaatatgcaacgagaattcgcgttttgtttctactacgagttctgcttgcaattgcacaccaaatacttcaaactttggatcaagttgcgtataaatcttgtctaaccggccctttaaggtttggtcatcaaaaatatcaaaatcagcacgtgtaaacatctttttcctccaacatggtatacttaggtttaattctaatatagcacaattcagaaatgaggcgactattttgtcagataatgatcaattacaacaacacttggatagtgccatgcacggcgcaccacaaaccaatcccgatgaacgccgccgctacctcggctcattacgtgaacgcgtcttcttaggcattactaaccaggaactcgccactgcgcaagctaaattcgaagcgcatcttacggattataagccctattccgtcttattaaacggcaagaatcccgctgctaccgattatttagtggccctttcagcacacgggattccgttcacgctcgttaacaacgaaacagccaaaaccgaaccaacggccttcggtttgttagtggttgccaaagacgcgattaaccatgaggcaattacgctcgatacactataccctgatccaaaaaccacaacgcaagatgcacccaccaaaaaaggtggtttcttaaaacatcttttcgattaacactaaaaaggcccgcacagtttaacttgtgcgggcctttttgcattactttagtcggtttcaatcgctaattctgggaaaagtaattgtaagacagtcattgaaacgcgccgcgcttgacccatcattgggaacaagtgcatcaacatcgctggattgtagtttgcttctagcacaaccgccatctcagggtgttgcggatcatatggttggtataagtttggcacaatgatatcgattcccgtgatattgaggttcaaaatttcagcaacctgttcagcaatcgcaaagtaactttgatccatctcatcggtcacgtcaaccgaatcaccaccatttgagacgttggaattttgtagtaagaagacctgtgaaccacgcaatggcacatcttcagggcggtaaccttgttgtttcaacatgagcaattcccgttcaccgaggcgaatgttttgcaacggtgtcaggtgcgcttcgccacgtaatgggttgtcgtttttcttagcaacaagttgggcgattgttgaacgaccatcccccacgacattggctggaatccgttctaaaacagcctggaccttatgattcatcactaagaaacggtattccgaacccgcaatgaattcttcaactaaaatttgctgatcatacgtttgtgccagtttaaaagcagcaatgaagtccgcttcacttggacgcgttaaaaatgtggtaatgcccgcccccatgttactgtgttttggtttaatgacaatcgcgcgctgaccaaacgccgcttgataatctgctactgccgtctctaaagcggtatattcggcacccgctggcacccgcataccatgacttgccaataaaattttagtcactaccttattatccactaacggcccactaattagccgatctaaactcgttatattcccatttttgactaattcatgatgatgttgataggtcagctcaataaattgttcatcgcgatccaaaacagccacatgcagccctttttggaaagcgtcaaacatcagcatttgtgttgataattccatatccgtgtatccctgtaactgatagggagtctctgtcagctcacatttaaaacgttttgcctgtttgagggcaaatgcctttagcgagtcctcttcaatcgcttgtgttaagcgataactcaaggtttgtcgatggtcctgaacacgctcattcatcactgtccaagcttgtttaaaacgctcattcagatgataatccgtaatgaattgggccaaatcggccatcacagttttcaattgtgtttggagctgcgatggctgcagcggattctctaatgctactgtgtcatttaactgacgacccgtctgaatctgagtggctaaatcaccggataatttcggcaaggataataagtacataaagaataagtgtaagaagtctagctgttgttgatcaatccccgtcgcagtatacgggttaatatcaaacccccgaaattctaaataatccacaccagtctctaacatctgatccaatgagtgactccgtaaccgcacagttccgtaaaattcgcgttccgaaattaagtcgccattagcaatcgcttggcgcattgaatcaacatatgcggcaactgaatcaaaatgaattaataattgcttattgctgtagccgaataattcactcgagcgtaaactccgtacagggtgttctggtaatttcgtcatatcttctaaaaagcctggttccgctatcggactcgcaccaaataaatacgttaaaacatagtgataacgcacgtaattttgcgcaatctggatgtacaacgcatcgctaaaatcttttagactcacatagtgatcatgatagtattcatcaaataaacgcacaattaacgtcgatgacaggctaaaattataatggatgccagagaccatctgtagacgtcgaccgtagcgcttcgtcaaatagtcacgataggcttttaccgccggtgtgtattctgaaattggaatggttaattcatcgtctggtaacaacggtggcatgctgaggggccaaatatattccgaatcggccatacttgattgcaatacttgttcgagcgctaataattgttgttggacatctacggtctgttcgaaggtatccgtaaccagttccgtttgcatctctgcaaaatcagtcgcaatgtatggatgaaacgttcgcgatcctaactcactggggtgcggttgttgactcaatgcgcccaatccggtcactcgctgcccctctttttcgaccccaaaagcaccttggttcaataaaggtgttaagcgtaattgtttaatgttctcaaataattgattaggcattttgaaacctcttcttaattcagtcttatacaactcattatacacatccctaaaaccttttaaaacgataatcactacgaatttgcgcgacatgttatactaggaacaacctaaacattaaaggatgaacgctatgcaacaacctctcgcatttcgcatgcgtccgactaacatcgatgaagttgtcggtcagacgcacttagtggggccgcaaaaaatcattcgccgaatggttgatgccaaactcctctcatcaatgattctctacggaccgcctggtactggtaaaacgagtatcgctagtgccatcgccggtagtacccagtacgcttttcgcatgctgaatgctgccactgatagtaaaaaagatttacagattgtcgctgaagaagccaaaatgagtggcaccgtgattttactcctcgatgaaattcaccgcttggataaaaccaaacaggattttctcttaccacatctagaaagtggccgcattatcttaattggtgcaactaccgaaaatccatatatcagtatcaaccctgccattcggagtcgggcccaaatttttgaagtcaagcccctcactgaagccgacattcatgtcgccattcaacgggcactgacagataaagaaaaaggcttaggtgcactagccatcaatctcgatgaaacggctgaacaataccttgcccgcgtcacaaacggtgatttacggagtgctttaaacgccctcgaactcgctgctcgttcaacaccagcgaatccagacaccaacgtcatcgacatcgatattgacgttattgaagaatgcgtgcagaaaaaagccattactcatgataaagatggcgatgcccattacgatgtcatctccgcctttcaaaaatcagtccgtggcagtgacgttgatgctgcgctccattatatgggccgtttgattgaagccggtgatttaatgtcgattagtcggcgcttgatgacaatggcctacgaagatatcggcctcgccaaccctcaagcctgtgcccgtacagtcgaggcaattgctgcggctaaacaacttggttttcccgaagcccggattccactggccgtagcagtgattgatctctgcttatctccaaaatcaaattcggccatcaccgcaattgataacgcgttagctgatattcgcgctggcaaagccggtgaagtccccgatcatctccgtgatgcccattatgcaggggctgaaaaacttggccacggtgtcgactacaaatatcctcataattatcccaacgactgggtcgcgcaagattacctaccagataagctcttaggtagtcattattacgaagcaaaagcaactggtaaatacgagcaagtcctcaaacaacagctagaacgcttgcgccaagccagtccgcataagtgaacggttacaaaagtgttgtgttaacatcacgagcgtgctattataatagtaggatttctaaggtgtgcgcgtcttcccaccttatgttgaccgatcaagtaattcgttaatgggacggatgagttattagcgagtgtagactttttcgcgaaggaaccaagtctaataataatctgacccacctgcattttctagcgggctcaactatcgggaagcatctacggcaccactagatttcccaaagtccaacgactttgaccgggctaacgtttacgttggcccttttttgttgattattttaggaggttgcacattgattcaaatcgccataatcgtttttttaatcattatcgccctacttggtgcgattttatgttactaccaagacaagaagttcctactctttgatttaactgaaaaccggcatttaggtcgattgatgtacttttcagggattgcactcatcggtgtagcgatctgcggggctttgatttactggctattgccactagtctggacattggtgacgctcgttgctgccagtttaatcgccggcttaatcggccttagctttgcaactaacctttaagatttacttttggcactgaactagcgtacaataaagatgtaaaattaaatgaggtgatgacaatgttacaacaatacaagcacattttggtcgcaatcgatggttcttatgaagctgaactcgctttccgtaaagcagttgaagttgcccttcggaataacggacaactccacttgattcacgttatcgatacccgcgccttccaaaatatctctagttttgattccgcaatggttgaacaagtcacagaaacagctaagaaaacaatggacgaatacatcgtgactgccaatgaacttggcttaaaagatgttgactatagcattgaatatggcgcaccaaagagtttaattgcccgcgaagtacccgaaaagaaaaatatcgatctcatcatgattggtgcaactggtttaaacgctgttgaacgtctcttgattggttctgtaacggaatacgttactcggaccgccgtttgcgacgtgctcgttgtgcggacagatttagataataaacacgcactcaacaagaaacgcagtagcattggtcacgaagaagcataaattagcaatcaaaaagccgggacgcttatgtcccggctttttttagtggttaaccacttattcagccaattgttgatcaacttgcacaataatctctggatgatgccggattaacgccaatgttttagcaaccgttaaatcctgtaaggcgttctctcgatgaagcgcatgttctgcacgaccaagaatgaaatacaatgcatcaagtaagtaaagactttgcttatcgattgcttcgtcaatcgcaagctgagcgtacttaatcgcaccttcataatccttcaattcaaaaagaattcccgctaagtgattataaatctgcaactcaacttggaaatcggccatagcaagtggatcagaattctccaacatttcaacggcttgttctgcataaatccgtacacgctctaaagcgcccttcatcaaataggacttgctaatgccgataatacatagaataccgtaaacatccgtctgagaaacaacgtattgattgaaggcacgattgaaaaagaaaagtgcatcgtccggtttattctccagcaataacttaatttgaccttggaaataataataccgtttgtaatcatctgctttgaccagttgatctgtgtagatctgctgaatcaaatcacgtgcttttttgaattcattggtaaataacaatgcttgcacacgactcaacaagacgtgtaattgatcatcttcttgcacaatcactgagtccaacgtaatttcaagccgcttacaaatttccaagagaatctttgtgcttggcacctgttcttttttctcaattaagctaattgttgcttgcgtacaaatccccttagctaactccgcttgagacatcccccgtgctttacggatttgttttagtttatcccctaatattctcattttaaatactccaattacatcattatttaatttaaaattaatttccggaaaatataacccaattaagtaatttacatcaattagcaatgacgctactagttgcgtttattatacactatgaactagttatgtggcattacttatttttttatccaataagtattttacactacatactaaacattaccaaacatttatctttaattaattgttaaggtgctgttcgatagtacgacaaaaaaacggcttcctgcagcggaagccgttttttataacgttgctaatattgccggaacttcttttaatgattcaatttgataatccgctgccgattgatcaatcgcgaaaagtggatcaaatggttttaatgcgatgacggttaaaccagccgccttccccgcttgaatccccagtgcagagtcttcaatcgcaaccgcctcggttggttctaaatgcattcttttaagcgcttctagatacacatctggtgctggtttattatgcgcaatctctgcaccactaacaaccgtttcaaaataaggttctaacgcggtttccaacaacatttgttgaataattccgcgctcaccagcggacgccaaaccgatttgatatgtcggtgcaacggttgctaataacggttgcgcgtctgggttcatgatatttttaaaaacgattggatgagccgctttatacgacgtatagccgtttttaattgccgctcgttccaaaacagtatggtttggaaacaactgttttaaaacggcattcatattggaaccaatttgtttacgactttcctctgccgttagtcgtgcgccaattgcattcaaaaatgctaagcgttgttcaaaatagtacggttcactatccactaaaacgccatcgacgtcaaaaataatcccttttactgtcatcttctctcaatcctatctggttaattaaaataaatctgaaatcttccgtaagtaatccgcaattttatcaggtaattcaggttgtagcaacaatgactgtaaaaagcgattgcggttataccaccgattccaaaaaccaacggtctcctgtggtgccatagtcaacaatgaacgctgccactcctgtaagacgattaaacaataatcgacatagagttgatgcttgttcattaaactgattagaacgttcgtcagatgactatcttcaccatatgcgagtgcgttatcagagaagcgatacgcctgtagcacaattgccatcatcaaaatcttatccgcacgttggatttcaggtgtttcgttaagttctgaccagacattgatgatatgcgtcatcgcatgcgcccagcctttaccatcaacgtatcctcgtgaatctaattcgatgactgtataagccattactcgccgttcaattgccaataattcggccgtacttaatacatgataaaaagtgcggttagcatataaaatcccggccaaaaacatcgcgctaaacgaacgtaaaaaaacagcgtcattttcaggttctaaaatatgcgcgaataaataatcatcttgcaataagcggcccttgacccaaatcaattgggctggggttaaaaccgtctgccgtaataatcgattgaataagtaaaaaacacctttatcgcgcacttgcgaatctgggcttgcaagatgccttaataaatcatcgagctcttcatcgctgatggtcgcttctttgcctttggttttaattcgctcatcaattgctgtgattcgttgcaagactgactcgttgtcctcaggtactacgacatgtgtccgccgcgtcttatattggacgccatccatgacgaccaatactttttccggaattgattgatagatgtcccctttaatcaatgcactacgaatcgcgtctaactgttgcatcacattttgaacttccttcatcaatcatcacccactctctactgaaaacatctcataactaactattataatgcattcggccacagacataaactatcaatccttaaacaggcccacgatatgacaaaatcgtcacctcgcttagaataaattccacctttagactgaatcaatgtaacttctagcttgatacgattaagacatcaattcacaaggagtgtcaatcatgaaaaaaatcattctattactgttctcacttggactaattgttatcggcggtccaattatcggatcagccacaactcagaatatgacggacggcaatgaccttgcccaacagtgggaccggttcaacctcttaattcccagagaagccgtctatgttaaaacagcacaccaatacgggacacaacaagcacatggcgattacctttaccggcaacctgcttaccgtgctgatggcagtcattacgaagtcgttttccaagcgccgcgcgcactaaaacctaatcactacttaaaattagatgccaaggggcgcttcgtcaattcttggactgtcgtttcaaaatctgaattgcccgttaaactgcagtctagtctataattgtaaaatacaatcgaactaaatgctgttaattgcgaaatacaaacgagggatttcgcttttttcattgcttacatttaataagtatgctatattattcgcatgcactgataaaaacgatttcacaagggagtaatgaacatgacagaattattcgatttacaacaaacacgccggacaatttatgcacttggcaaaaacgtttcaatgagcgaagctgaattatcagaattaatcttcaacaccattaaagaaacaccaactgcttttaacgcccaaggttcacgcgccattattctctttggagaagcaaatgaaacactttggaacgatattacagcaactgccttaaaaccattaacacctgcggaaaacttcccaagtacacaagctaaattggcttcattcgccgctggtgtcgggacaatcttgttctttgaagatcaagacgttgttaagaatcttcaagaaaacgtgccattatatgccgaaaacttcccaacatggtcagaacaagcttcaggcatggcacaatatgccacttggttagccctcgcagaaaaaaatgtgggcgctagcttgcaacattataacccagtaattgatgaagccgttactgcaaaatggaacattccatcaaactggaaacttcgtgcgcaaatgccatttggttcaatcgaaaatccagccgatgctaaagactacaataccgatgcaagtcgtttccaaacctacacaaactaattttaaaccgaatcgaccagagtgcgcatgcactctggttttttattttacccaacaaaaaaagcgactcgcatccgcgaaccgctttttactttaaggagaatgagagattcgaactctcgcgtgggcagaacccacctgacggttttcaagaccgttcccttcagccagacttgggtaattctccatatcaaatcttacaacgtttattataatatcaagttcgctaatcactgtcaagcctgttttttaaaaataactgctatttacacccgcccaccaactcggtatcataaaggggtgcatttaaaatcaagtaaaactacttggactggttcggaaacttcccagaataaaaaactaaggatctcaaggaggttagaaataaatgcaaactcgcaaaatcattatcgattgcgatccaggcatcgatgacacgctcgctttgaatttggccattcaatcgccagcggtggaagtcgttgcaatcaccattgtttgcggcaacgttcccgtccaaatcggcgtggacaatgcctttaagtgtcttgaacgcctcgggcagctcgacattcccgtttatgttggtgcggataaaccgctccataaaccatttgtcagtgcgcaggatacgcatggcatggatggtttaggtgacagccatatcccgcgcctatccactattcaaccggcacaacaatccgccgctgattttttagcagccacttttagtcaaccgagcgatatcagtattatcgcactcggaccattgaccaatattgcgactgcgctccagcgaaatccagatttaggtcggcactgtgcccgctttgtttcaatgggtgggacctataagagtcacggtaactgctcacccgttgctgaattcaactactggagcgatccggatgccgcactgttggtattcgaccaactcgatcaaaagattgaaatggttggcttagacgtgacccgcgaaattgtcttcacgccaacattgctggcttattgtcagcgtgtcaatcctgaagtcggcgactatctaaaagccatcacccagttttattttgattttcattggcaatatgaacacattatcggctgtgtgatcaatgatccattagcagtcgcctattttatcgatccaaccctttgtcacggctttgaaagttataccaccgtcgaaacaaccggcatcagcattggccaaacactggttgaccggttcgatttctggcaccgtcctgccaatagcctcatcttaactaaggtggacaccaatcgtttctttgaacagtttttgaccgtcgttttaaatgcacaagcaaccctcattaaaacggacttaccaaaacttagataaggaacctattatgcgaaaatttaaaacacaacacttaaccattctggcacttgccattgcactcaattacgtaggcgctaacattgccctatttttacggttaccaatctatctcgatagcgtcggcaccattttagccagcaccctattaggtcctctggcaggcgcattaactgccacttgcagtagcatcatcagcggtgtcacgaccgacttatttgcgctttattacttgccagacggtctattaaccggcttactcgctggatggttcttataccaccaccaacggacgaaacgcgagttaccccttgttgctttaggtgtcgccattcccggcacaattgtcagttcattaatcacttacttcttgttccacggtatcacctcttcagggtcaagtttaattgtacaactactaagcggcttgggactaaatcagtttgtcagcattacactggttcaagccggtacggattatctggaccggctcttggcaatcattgtggtgacacaggtttgcgtccacctcaaacaaaaaatcaagacactctaatcaattaaaaaaaagcaagtgtgcttctaacatcaattagaaacgcatttgctttttttagttttgcatcagtaacgtgacatactgttctagataatctcggtcgacctcatcgtaagcgccaacgacgcggttatcaagatccaaaacaccgattagttgattagccttgatcattggcacaacaatctcagaacgtgcagccgaatcacaagcgatataattctgatgttgcgccgtgtcttctacaattaacgttgtttgctttgcggcggcttcaccacacacccctttacctagtgcaatgtgcatacacgagacgtttccttgaaatgggcctaaaatcagctcagcatcttgatacagataataacccgcaaaaacagtctccggtaatatttgatttaataacgccgaagaatttgctagattagcaattaaattcgtttcacctgccagcaaagcagcttgttgttttaagagcatttcgtaagcctcgactttagcttcttttgatttaaacatcacaatcacttcctcttttcaagctattatagtggaagcttgctgcgttagcaattcaaaacatcccttaatttcgacattaaaaaaaccgcacatcggcggtttttttaatgaaaaattgttttatttcttcgataaactgtctctggttcgccctcttcatgattgacgtaccgcgcaatcgcgtacaaataatcagagagccgattcaagaaagttaatacagcttcgttaatcggttctacttcctgcaaggcgacgacttggcgttcaacacgccgcgcaattgtccgacaatattgtagtttcgctgctgatggtactcccccaggtaaaataaattcttttaaagcaggtggaacatctgcatactgatcaatcttagcttctaaccatttcgtgtatgcgttgtctgtccgatacccccgcgaatcatccggcgtcgctaaatctgtcccacagtcaaacagaatttgttgaatctcaaccaattccattctcaatgccggataatcaggtaaatcactgatgacgacacctaagtatgaatttaactcatcaacacccccgtatgcttccacacgaattgcgtttttgcgcactttttgaccgccgataattctggttaatcccttgtcaccggtctttgtatatagtttcaatccgtagcctcctaaaactgtcatccattatcaattttagtgtaccacgtttgaaagcgaatttttggcgttgcttaatttttaacacttgtctgcttgtatcaatttaagtaatgcctcaattcgacggtacgaaacatcacatgtatcgccatttgtaaatatcacttgatgcgtctccttatcaatccgtacgactttgtccggattcactaggatactcttatgggctctgaaaaattgtggcaattgcgcttgaatcgtcacgattttccctacaaattcacttaaccgatgatcactgtgtaagaagacgtgccgtgctttatacgctgtttcgaaataattaatctcttgaattgccactttttcaaacgataatccatcatcatattcaaaatgagctggttcttcagctaatggcacctgttgttgtcgtaacttaatggcatcgttaatggttgcttgaatatctgcacgaacctgtgctaacccgcgatccttcaaaataaaattcaaaacattaattcggcgttgaatggtttccattaaaagttcgtcatgtgttgaaacgaacacaatctgtgcatatggatccaattcacgaattttaagcgccaattccatcccatccagcacgtcattctctaaatcaatatcaagaaagtaaacgcccccttgcgtttgactttcttgtaaaaaaattaataggtcatagccattcttagtcttcaaacgcacctgagcatccaatatattttgttgaatatatgccgttataatctcttcataactatctagtaaaacctgtttatcatcacataaaaaaatatcaaccatgggtctcctcctgttcaacaacaagcattgcaacgaaatagtctccatcttgttttaacattaagctaaaatctgagcgcatatccgtgatttctttagcagttgtgagcccaagcccgcgattaatccccttcgttgaataaccagcctgataaagctgaccaaattctactggtgtattaatcgtatttttgacacaatagaccatcttacccttttgctcgaataaactgacactgattgaaccatctttaatatcatttaccacgtcaattgcattatccaaaaagattcccagaatccgtaattcatcaaaatactgttgttgcttaaataaatccggttgaacctctaaattaaagggaatccgattattatgtgcttcaatatacttgctaaaaataatgcctttaatataagcattattaatctcttgaaaccgtccaattgcctgatcttgaatcgtgtcaaagttataatgcgttagtaaatcatgaaaatcctgcattaaaactgggctcccttgttcattgataattgtctctaaagccaataaagcattggcgatatcgtggcgaaacttgcgtatttcacggtagttacgctctaactgttcaacatacagcgttagatttcgctgactttcttgttctacgttgattctattttggcgaatcacagctttcgtatacaaaagcattcccacaatcaccaaaactaatagtaatagcacaagtcctaacacaaggtacaaatattcaaccggcagattcgcatgcttaaagctatcaaaaagcaccatcactgccaccacaaataacgcgagaccggctaaaatcgtgccggccacgcacataccgtatgaagcaatggatactttaataagctgatctaaccgttggacaattaatcctaatccggctgcaatcaataattgactcaacataattaaacacaccatttgccaattaaactggctactcatcagattatcaaggccctttaagtgagtatacccaattaaccccaccgttgtcagaaccgatgatagcatcacgatgatgtaactaaagatggttgcgataattaacgcataacttgtctttaatttacgcagatttttaaagccatttaaccaaccatataatccaacagttgccaaaatcagccatagctcttcaagaaaatttccaattaataaatccattccctgaacaaaagcaatgccgactccaactgataatagtagttgaaatctgttcgttcgtttcaacttccccgtcaaaaataatactaatagtagaaacgaactaaacgtacttagattaatgacaatctgcattgccagcggcattttcattgccatgcataaaactccctactcgaaccttaattccaaaaccagaaaattaaattttgaatgttactcatcattatcatacccctcctttcatattatgaatacccatgattggtgactcatttcgattttatcacgtaatttttttaaaaggattaaatgtcataaacgtatacttgtctgcattaaacgtatataattaatcataaatatagataaataattactatttggaggctaaaaatgtttttaggccaattgatccatcaacagcgactcaacaagcaactgacacagtctgaattagcagcggggatttgcacgcaaaatacaatcagcaaaattgaaaagaaaaatctgccccccacaatcccaattctaattaagatttgtacacggcttggattgacattaaatgaacttttcaccgaatttaacgcgctcgacactgccagtgacgaaggcgtgatttctgcggaagttgctttattagcaggcgattctggccctgctgccgcattaattaccgatatcgacttcaaggcaaccgaacatccttatcccgccatcttcttctttttcaatggctatttaagttaccttgaccatcaatctgaattacagattttttccgcttataactcgttcacagcggccatcggtgacgacacttcaacgttgaagttacttctaaataccggtatgggtttaatttaccaagaagctggcgaggaattagctgatttttatttcaataataatatcaatttcatcaaccaacttgatcacatcaatgtcattgatgttcaacgcgtcctatttgcttcgcgtcacacagcagcctatatgattaaccaacaccgcattgatgcagctatcgagtttttgacgaaagccctcaaactgagtcaaaaaaatcaaatcatcaaacaagtcgatcatttgtattacctccgtgctcgggcgcgccaacaaagcggtcgagactatgcagaagatcgcgaaaccgcgttagtttttgccaaataccttaaaaataacgcgttaatcgctaaaattaaagcgttaaactaaaaaacactatccgattggatagtgtttttttaactaattggttgaacgcgactggcaatcatcaccactaagcaactcttgatcatttcaatcggaaaatacggcacaaaaccggtcattaagccggtcactacggataattttaatgaccagattagccagagtgtgccaaatccgagttgaataatgcttgctagcacattgccgccgagaagtacgcggttcgattgtccaaatagttgctgactatagtgaacaattgccacataagcgataaagcctatcaggtagccgcctgttggtccgaccagcactgcagtcccactggcataatttgcaaagaccggtaagccaagcatgcctaacatgagatagctcccgatgaccagtcgacttaagcgccatggtaacgtggtgccaattacaccgactgcgagcgtttggagtgttactggaaccagcgaaatcggtagactgacttgagcgctaaccattaataacgccaagcacatttcgactaagctaacttttctggcaaccgatagtgtcatttaaatcagctcctccttaaaatcaatcttttggccgactgccacttgcgagtcatcgctcaaaattaacgtaccatccgctagaagctgtgtaatgacaagcccattttgcagacgtcggccaataatcgccgaccagttgcagtaatgagcaacaatcgcctcgtccgcttgggccaatccggccgctagtcgattaagatacgtggcacaaaattgattgatgttcacttggtgggcgtttacggcttggcttacatccattatgaaactgccgctgccgtcctttttgaatatgtgcatgctttctacaataggaagagaattcatagttcactgggctaccagacccccttacaagttgaaattgcaacacttacgagccaaatggccgcctgatttaatgctttccagggttcaaataagttattaatcgcgattaatgatttatttgagctgtggaaggtaaacgcggttctgaatgtctcttaaaatctgtctcaaatattgacttcaatccatatctcctataatttttattttatcataccatttaatactgcatactagttaaatctctctaaaaatttctatccaaatggtgttacttttggtgttactttctacatgcacaaacaaaaaaagccagaaacgccttcaaataagcatttctagcttatgcaattcaattaccccacactgccttccatttcataactaatcaatcgattcaattccaccgcgtattccattgggagttccttggtgaatggttcgacgaagcccatgatgatcatttcggttgctttggcttccgagatgccacggctcatcagataatagagttgttcttcagaaattttagagactttggcttcatgttccattgagacgttgccgtttagaattgtgttgtacggaatcgtatcagagctggagcggtcatccataataatcgtatcgcattcgacatgggcaaacgaaccgtcactgtcgcgttcaaaacgaacagtcccgcggtaatcaacggccccgccatctttggcaatcgattttgaaacgattgaggatgacgtattcggtgcagcgtgaatcatccgcgcgccactgtcttgatcaacgccttcgccggcgacggcgattgagagcatggttccgcgggcaccttcaccatcgaggtagacacttgggtatttcatggtcatcttcgaaccgagattcccgtcgacccattccattgtcgcattttccatggcttgggcccgtttagtttccaagctataaacgttctttgaccagttttgaatggtcgtataacggcaatagccatcccgtttcacaaagacttcaacgaccgctgcgtgcaagctatcacttgaatagcttggtgcagtacagccttcaacgtagttcacgctggcgccttcatcgacaataatcaatgtccgttcgaattgacctgaattttcggcgttaatccggaagtacgattggattggaatatccgtccgcacgccttttggaacgtagatgaacgtgccacctgaccaaacggccgagttaagcgctgagaatttattatcagttggtttgaccaacgtactgaagtattccttcacaatttcagggtattcgcgtaaaccggtatccatatcggtaaaaatgatcccaagtttttcgaattcttcacgcatgttgtgataaaccacttctgattcatattgcgcactggaacctgctaaatacttacgttcggcttcaggcacacctaagcgatcaaacgtttctttgattttgtcgggaacatcttcccaatcgcggtattgcttgtccgttgccttttgataatacaacatgtgttctaaatcaagatcggataagtccggtccgaaatctggcattggcattttttcataagcgtgaaatgattttaagcggaaatctaacatccattgtggttcctttttctcacgcgagatggcgcgcacaacgtcttccgttaaaccgcgcccagttgaaaagacgggctctacatcgtcgctaaagccgtagtcgtactcttcaaattggggcatcgttgtctcttctgtcattcgttagtttcctccgtttctgcgtggttcatcatttgaccggttgttgcacgtcggtcatcgctatttaaggctttgtggagcgccttccaagctaaagtcgcgcatttaatccgcgcagggaattgttgcaccccttgtaaaatcgcggcatcttctaacaatgaccagtcttcgtcacgatcaccaatcatcatatccgaaaagcgttcgatcatcgcctccgcttgcgccggtgtcttatgcatcacggcatcggtcatcatgctggcagaagcctggctaatcgtacagccttcccctgaaaaagcaatctgactaatctgcccgtcttcgagcaccagttcaagttgtaacacatcgccacaggtggggttgcgtaattcaatttcatgatcggcagtcgtcaagtgaccatgatgatgcggatgttgcgaatggtcaagaatgacctgccgatataagttatctaatttagagagtgccattttggaaaaactcctttgctgcttgaatggcggtcacgaacgttttcacgtccgcttcggtattgtagaggtaaaaactagcgcgcgcggttgcggcaacgttcaaccattgcatcaacggttgtgcgcagtgatgaccagcacgtacggcaacgccttccatatcgagagcggtcgctaaatcatgtggatgtaaattgtcgagattaaaggcaatcacaccggtgcgttgggcggcatcttgtgggccataaatcgtgaggccgtcgattgcttggagctgcggtaaagccattgtgactagcgcttgttcatgggcttggatatgatccatcccaatttgcgttaaataatcaatggcggcccctaagccaattgcccccgcaatgtttggcgttccaccttcaagacgccacggtaattctttaaacgttgaagattgtaagcccacaaagtcgatcatctcgccgccgtattccacgggtggcatctgttcaagtaatgcttgcttgccataaagcacaccaatgccggttggtccaagcatcttatgccctgaaaaggcgtaaaagtccgcatcaagtgcctgcacatcaaccatcatgtgcggcacggcttgtgccccatcgaccaccatgtaaccgccttgtgcatggactaaagccgcaattgttttaatcggattgacaaccccaagtacgttggaagcatgcgccaaactaacaattttcgtcttaggcccaatcacctggcgtgctgactctaaatcgagttgcccatccggtaataagtcgatgtaacgcaatttcgcgcccgttttctgcgccagttgttgccacggcacgagattactatgatgttccatcacactaatcacgatttcatcgccggcttcaaccacggttggaccgaaactgcctgcaacccagttcaaactttgcgtcgtcccttttgtgaaaatcacttcggcactcgcagcggcatggatgaaggtttggaccttcgtgcgcgcggcttcatactgggcggttgctcgttcagctaaagtatgcacaccacgatgcacgttcgcattgtcattttggtaataagccaccaaccggtcaatcacggcttgtggtttttgggtggtcgccgcattgtctaaataaacaagtggttcatcattgacgatttggtctaaaatcggaaagtcgcaccgataatcatttaactggttgaccatcgattaacttcctttcaatcgtgtccgttaattgttggcgcacgtttttatccggaatttcacttagaacagcgcctaagaaaccacgaattacaagtcgttgcgcgacttcttttgaaagaccgcgactcattaaataatacatttgttgttcatcaacgcgcccgacactggcagcatggccagcttgcacgtcattttcatcaattaataagagtgggttcgcatccccgcgtgctgtccgcgataacatcaagacgcgattttcttgttgggcatcggcacccttagccccttttaaaatatgcccgatcccgttaaacgttagcgtcgcatcttctaaaatgacgccatgttgcaagatgtgcccaattgaacgcggtccaatattcgtcacacgcgtatcaatcccttgaatctgtttaccagttgagatggcgaccactttcgtttcagcatgtgatccagcacccactaaatcagaatcaaagtcaccgatgatattgccatcattcattgatcccaatgcccaatcaatccgcgcatcgcgcatcaagtggccccggcgattcaagtaagtcgtcacggattttccaaaggcatcaaccgctgaaaaatgaacgtgactgttatctttagcaatcacttccacgacaacatttgctaagttcttgtggtcacccgctgtttggagattttcaagataactaaattcactgttttgttcggctactacgaggacgtgatgaataaaatcagcgggttgagtgctgtcctgtacataataagccgtaatgggttgcttaatcaccacatttttcggcacatacaagaagagcccactgttcatcaaagctgtgtgaaaagccgttaagcgatcctcgttcggtttcactgtgacttgcatgtagtattgttgtaccaaatcaggatgttcttgtaacgcggtgaaaatgtcggtaaaaatgacaccttgttctgccaattctgccggtaaatttaacttggcagttgtctgaccaatctgtactgcgtacggttgatcagctgaaagattcgctgccgcagatggcattaaactcaaatcggatttaacggctgttggcgcatttgctgccatcactggccaatgtttatagttaattttttcaaagataggcagttcgagttgctcaatttgcgcaaacgctgcttgacgcatttcagcaaaccaggccggttcttgatgcaattgtgagaatgacgcgatttgttcaggcgtgatggctaatgttttcttcatcagaatcgccccctatttactttcgtcgtcagtcagtttgatatccaagcctaattcgtcacgaatcccgacataaccttcgtcttccaaacgttttgcaagtgacgcatcaccagtcgtgacgattttgccacccatcatgatgtgcacataatctggcacgatgtagtttaagagccgttgataatgtgtgatgattaatgagccaaaatcagccccgcgcatttcgttcacaccttttgaaacgacttgcaaggcatcaatatcaagtccggaatcaatttcgtctaggatggcgaatttgggttcaatcatcatcaattgcagaatttcattccgtttcttttcacccccagaaaatccttcgtttaagtaacgttctgacatttcttccgtcatatccaagaatgccatccgttgatctaattttttcaagaaagccatcactgaaatctgatcatcttcagcccgacgtgcattaatcgccgcacgcatgaattcagcgttcgttaccccttgaatttcagcaggatattgcatcgccaaaaataaccccgcacgggcgcgttcatcaaccggcatttctaaaatattttggccatctagtttgatctgaccttgtagtacctcatacttgggattgcccataatcgtttccgaaagcgtcgacttcccagtcccgttaggtcccatgatcgcgtgaatttcacccgtgttcatttccaggttaacaccttttaaaatttccttaccgtcgatgccgacgtgcaaatcgataatctctaatttagacatagatgaccctccaagaatcgcattctagcaattattatacgctcttaattctatgctaattgagaactgttttcaatgcttgaatgcatgaaaaaagaccacgcggacaacgtgatctttttcaatagattcgcacgggaaataggttaatattactcattgatttgatactcttctaaaaccgttgagccatttggtcagccacaataccggttgaactactcattgatttgatactcttctaaaacattaattggcattggagtttaaaggagtatgttgaactactcattgatttgatactcttctaaaacttgagcgtcaatcaaaacaacccgttatttgttgaactactcattgatttgatactcttctaaaacaaccatgtgttagattgaaaatgaatccttgttgaactactcattgatttgatactcttctaaaactgtttgtaattttaaccatgtccattatttgttgaactactcattgatttgatactcttctaaaacgctgttgctttggcgtcgtcaatatcataggttgaactactcattgatttgatactcttctaaaacccacctttttaagtttaaacgcttgctggtgttgaactactcattgatttgatactcttctaaaactatatttataataccatgtggcttttggctgttgaactactcattgatttgatactcttctaaaacgaggcaaagcatcatgtccattgggataatgttgaactactcattgatttgatactcttctaaaactgtctccgctatctttccaattaattacaggttgaactactcattgatttgatactcttctaaaacctgggtaacgtttaagaatctccttaaccggttgaactactcattgatttgatactcttctaaaacagatgttacaacccacttatttccaattttgttgaactactcattgatttgatactcttctaaaaccgttgttttttcatcagaatttcattttattcatagcgccattcgacataatcattatcgatgtgataataacaacatttctggtactgatcagatttaacctcttctgaaaattcaatgagaaagagtttcacattcaatgtcgccaccaacctcaccaattcattaaattggttgatactgagatagtgcgaaacattgatcaacgtgattatttttgattcatttaactctactgctgtctgtactatactctcaattataccatatgggtcatgttggacgacagtcgaaaattgtaaattatagaacttaatcattctttgaagatcccattcctgattgacatctaaggtcaattcatacataaaggccgcatccaaaatcgttgaacgaatctcactatctaactgagttaatttctggcgctgctgatccgttaagtcggcggcgaattttttaatcaaccgattttgaaatagatgattcaaattaattgctgccacatccccaccccaaataacagcctttgaataatccattaattcgtattgatcattgctaaatttaacggtctcttgtgcgccggacattccaataatgagtttggtatacacttctggactacttgtactgcaaaccgttattttcttattctgaacgctaaaggggtggtatggataaaaagtaatgttcatagaattaacgtcctctcagcagaattacggacgtcatcactcgattcgcccactaagaaatgcattttattatattgttgctcagtaaccatcaacgtttgtactaagcctgcaggcggagtaaagccagcaattcggttctcgataaactgcgccgattatttgctgacacaaactcgaacataaacagaatattgaatcattaaaaaaccttcgttaagcagcgcttttctaaaatgacggtatgccttgcgatcctcgctcgtttcaactggtaaatcaaacatgactaataagcgcattattcggtacctcgtgagtcattaccacctttacttcaaactcttctttcggagttgtcatgaatttcaaacaattctgtacgtgtttagtgagtgcgtttctaagaattgtgatctgtccattatattctagctcaagattcagtaactccactaaaccaaatttaacatcaggggttaattcattaaacttttgatgtgccacccaataatcaatcactggtcgaaaaggttccattagatcggaacccaaattaaaatcactgacgccattgtgatgatgaatgccaaactgtgttaaatagccattacaaacaatttcgcgattaacggctgataacaacaaactataaccataattaagggctgcattaatgggactgtactccgttcgaacaaagtctttatcaaaaactaactgaaaatacttgcgcgcaatcacggcttctcgatttgttcgatcagcaaataccattgcatcagcttctgttgttaagtcttcaatatcctttcctaacaattgtgcacattgaatttgcatcgctattttggcttgaataatcgccgtccataaggtttctttcaaccccgttccccattcaacctgttgctggatcgacgcgagactacgatttcctggataatccgcaattgtttcgcaagttggattaccgtctttgcctgtaaaaataatcttagcgccagcttcactcaactcagtaatcgccgatgccgttaaaacggcctgggtagtcgcaactaacaaaatttggatatcatcaattggtacttggtgtgttgcatcttttgtctggacaataatcttccgtccagaataagaaacctttgcatgttgtgaaatcacaactgttcgccaactcataaaaatttaccccctacatccttgttttcaaaatgatgacatgctataatgctgttgttgagcttgatacactcaatcgaaatactcattgatttgatactctgagttaaaatcaaacaaggtcttcggaccaagttttctattctgagcctcttatgaggcctttttttatgccttcaaaccaaaaagctagcccatcattacactaatgacaggctagctttatttatttataaatcccttaaagctactcgtcgttcgaataaaccggttggagattgatagataatttgggtatcaggtgaaagagaaatccctgatggttgctgcatttgacctagtggcgtacttattttcaacacccctaagtcgataactgccgcatttgcatgcaatccaattagaactctatccaatataacttgttgcccaacctgcaccatcttattaccatcccattgactcttccacggtaacttcataaaggctgctttacccgcagataatttagctctgaattgattagtatcatacagtggaaaatagtgcatcacttgatctaagatttcatcataaacttgttcagcgagttcttcagactgtgttaaaggtagcgcgccatttaataatttaacagccgttttatcgagaatcagttcctgctcgttgtgtttatacgtcgcagagcccaatgtcaattcttgaccattatcgaagaaacgttgattgattaggatatgtggtgcaatgacttcaaagtcttcgaccactttcacaatcgttcctttttgttttttcacttttgtaaattgcggactaattttttgctttaagaatgccttttgtgagtcttcatccgtcagttgtttaagttgcgctaaccaacttgtctcaacaccacagactttatagagatcaccctttttatttttaatgcgtacaatacacatgtaggcaacggtcttccctgagtacccaccatagagtgcagttggtcgatcttgtttagcgggaatcaattgcttgccgccctgcccacttgctttatcatctttagccgcatagagcgtttgattaaatagcgctcccgaattttcatgcacttcgcgagtcactagaatcttcttaaactgatatattttattcaaataagctagaccggattctttatcccaaataaccgcttcagtattttcatcaaccaattcgtctttctttagaccatttaaaaaattaaagttacgccacttatcttgctgacttgccttctgatactcaccgtatacaaaataaggttttaatttaggatagcgcttcaatagatacagaccaacgaatgcggtcagataagcatcgaatgcatgatgatggttatttagattacgattcttcggaaaatcgaattctgttcgcatttgatgggttaacccactcttaaccgtaattaactcaatattgtcttcaccatattgttccatcaatagatttgtcgctaacttaatgacttggcgtgtttctactaattgccgattaataaagcccttcatggcgtatttactgatatgatcaggatttaacgttaagttatcgtatttcttcttagtaattaacccagcacgcaacatttgttcccactgaagctgcatcttcttaccaagttcaacgcttgtaaagtcggtcggtacttgatctgctttgctacggttcattttttgagaaactaaaactcggttatctaacgaattatccttcacaaacgactgtggcaagatatgatcaatatcgtacgtcgataaacgatcaatattcaacgaatcacccgtatacatatcccgaccaccctgcatgaagtacaagaataagcgcgtattgctcaatgcagaattcgataaatccttaagttcatttctgatttcagtattatttagcaattcattgctgatattttgatagacttgttcaacttggcgcttacgttgcaccgaaagtcgtggattcacttcatcttcgcgcgcaaattcaatcaatatccgttctggcgcctggcctttcatggccttttgaatgtcattgacaacaagcagaatctggcggagcgcttttttattctgtggtgacgtatataaatcattgataacatcttgtacatcattttcagctagcatcatttgattagcttcagtaattaatttatcaaagtcttcagagtgcacaatccgcatgaagttatccgttgtatcccagagtaagtccataattcgttgtccattcgcattgacgatttgcgttaataatttagccgacaaacgaccccaaccgcggtagcgtttagcagctaattgcacacgttgctgatccgttaaccaatcgatttcattcaatttggcgctatatattttgccgtcttcaaaaatcgttgaccattcaatacatttttccaaatcggcttgtttatcaacatcatcaaccgcatctccaacaatcttctttaagtcatgatacgtgcttaatcgactattaaatttgttctcatcggatagaccagtaattgcgggacgacttgcatagcgcttttctgataccaagtaatcctgaatatttttcactgttacacttattttttgcataaataaatccgtaaatattgcttgtttcaactccgtcgtaatcggttggtcatcaatcttaagtccgtttaattcattcaacacttcaaaccgttgataaattaagctctgtttagggagtacatcttcagccaataaataagtatcagtcgttgtcatgcgcttaatgaattcattagcggatgcttgacggtccactttatcatcgaagttccacggtgtaatccggccttctgctttacgaatcagccacgcaaatttcgcatcggagctttgtcgttgctgctcagccgtaatcaggggccccacatagtatggtactctaaaggccactaattcgtccaatttatatttagcgactgtttgccgtttagaattgggattaagttccgctaaccagggatagtattgttgttggttctcaataatccggtctaattcctgttgatgtagttgatgcggaattgccccattatctttggtccgttgttttggcataaattgatcaagttcaattaattttttaatttcactcacaatcggatgatctgggttgttctttaaggcttttgtgatatctccgtaaaaatcttccttcgaataggccttcgtattttcttgaccatcaacatattggtcataagcctgctttaatctctgtcggtctccaggtgctaacgcttcccgtaccgcttttagcatttttaaatgcttttgatgatcgtcatacttcgtgatcatcgcttgcgacaatgattgattttcgggaacgattcccgccaatagaacaccagaataaagttcctgtaggctttcgataatttgatgggcattatcatcaagactactctctaacttgaccatttcttcatcaaagttttctgcattaaaagtgagtgtccatgctttaacatcttcggcttcgatcccagtaagcacattaaacttcgcttttaaccccaagattgcttttaataattctgtcgcaatcgccttattctgcttttcaactgccttattcgtacttggcgtataaatcagtgataatgcttgtctttgccgattgctagcactttgttgattatccaataagagcgctttgacctccgccaatttatccgtctctagttgaaagccagattcactgaacaagtcagcaaaaatcgtgtttagtctgtcaaaatgagccactaaattaatttcgctactcttaaaggatgagacgggcgcttcatttaaaaagtgcccgcgatacttcacaatatgatgcatcgctaaataaatctcgcgaatatcaaattgacgtttctcggtcattagcctatatcttaaatggtaaatcgttggataatcgtcatagaatgcccgatctgttcgatcattaaataaacttgtctgtggatgtaactttcgctgatccttcggacttaggtttgattgtttttgccgcaagaaaaagtatcatcaaccggcgtgatatagggttcaaagatttctcttaacaatcctaaccgccatttacgtcgttttaatcggcgacgtgttgttctaaagctgcgccgttctgcggctgtttgtccttcatcgtataaacgaaccccataaccatatttacctcttacactgaccaacttactttggtcatcaaccactgaccacccaattgaactagtaccaatatctaaaccaatattatacggacgactcattcttactccccctaaaagtttatattcaatgatagtatatccaatttaacccgctttttccaattaaattaagaattacacatgctaacagcaaaaaaagacaagtcttaatgacttgtctttgatcattattcaactggtaacactgcgccgtgccatttattcttaatccattcttgcgttgattttgatttgagcgctttaacgagcttcttgatagctgggttattgcggtcttttttatttgtcacaacaatgttggcaaatggcgaagattgcttttcaagggccacagcatccttttcagggttgagaccggcttgcacagcatagttcgagttaatcgccactaaggtgccttcatcattcttcaaaagttcaggcatgagttttggttcgaatgtgtactcaaacttgaggtgtttgggattgctagcgatgtctttaaacgttgcgttttcagcatttacgcccgatttcaaggtgattaagccaccgtcttttaaaattgttaaaacacggccccagtctggctggctgcttgaaactaatactttcgcacctgatttcacatcactcaattttttaacttgtttactgtataagccgagcggttctaagtgaatactgccaacactgactaagtcgtagccgttatctttattggccttcttcaaaaagggtttgtgttggtagtagttcgcatctaattcgccactcgctaaagctttattgggtaaaacataatcgctgaagacttttactttgaggttgatgccttcttttttcaactccggttgaacgtgtttcaaaatcgcggcgtgtggaattgcggatgccccaacgacgattgtgttgctgtctgacttcgcttctttgttaccacaagcggcaagtgcgcccgctaataagaagactgctgctaataatcctaaactgtgttttttcatgaaaactcctccttttaaattaacgatgatcaatgtgttgaacaaccaagtcgcccgttttttgacaaatgaagacgatgattaaaataatgacggttgcgactaacgtaatcgcattttggttagcttggaacccatcttggtaagcaagatttcccagtccaccggcaccaatcacccccgccattgcggtataaccaacaagtgaaattgcggtgacggttaagccggaaacaagcgccggcatgctttctggtaaaaggacttgccagacgatttggacttttgaagcgcccattgaacgggtggcttcaagcacaccgccatcgacttcccgaaaagctaattcaacgagtcgtgcataaaagggcgcggctgagatgattaacgctggaatcgcagctttcgggccaatcatcgtgcccatcaagccttttgtcaatggaatcaacaagacgattaaaatgatgaatggaatggaacgaaagacgttcactaataaagccacaatgccattcaacagccgattcactcgaccaccactcgcgtttgtttgataaagaactaacccgagtgcgaatccaagaactgccaccaataaaacactgacaattgttaaccaaactgtttcaaaagttgcttgccacatacttggccagttcacttgcttaaattgaaaataggattgaaatccgtttacgttatccatgacgtaccacctcaacttcgattgtttgttgtgctaattctgcaaggactgcctttaaatcacttggattagcttgaatttgaatgtataaatagccaagtgcgccattaatggtttgttgtaaactcccactgatgacactgatttcgactgctgggtattgacgcatcaagcgaccgatcaccggttgactcgattgttcttcgttaaatcgcagttggacgattgtgccatttggaacccgttctaacagttgatcaatcgaagcggccgtttcacttggcgacaccactaaggattcagcaacaaatgccttggttgcagccatttgtggtttttcaaagatttcgtgcacagtcccttcttcgattaaccgcccattttccatgaccgcaattcgttggcaaatccgccgcaccgcatccatttcatgggtgacaagaacgattgtaatccccatttcacgattaatcttagccagtaacgttaagattgaattcgttgttttcggatcaagggcgctagtcgcttcatcacataacagaatcttcgggtcactaatcaaggctcgtgcaattgcgacccgttgtttctgaccgcccgatagttcgcttggataggccgcttctaaatgggtcaattcaacaatctttaataatgcgcgggctttgatttgtcgttctgccttaggtaccccggctaattttagtggcaacatgatgttttctaacactgtctttgaccagagtaagttaaagtgttggaaaatcatgccaattttctgccgaatcggccgcattgcttgttcgctcaaccccacaattgactggccctcaacgagcacatccccagtcgttggcttttcaagtccattcaagagtcggatcaacgtactcttaccagcgccggaataaccgataatcccgtagattttgcccgcttcaatgttcaacgagacatccgttagtgcggcgaatgttttttgttctcgctcaaaggttttacccacttgttttaatgtcaacatactaatcgctccctcttcttttaaaaaatgccaaaaaaaaaatccttcctctcaaataaatgagagaaaggacgctaaatgcgtgttaccaccttaatttacgattacctcacagtaatcgccttacaaagtacccgattgatactcgttcgctatatcgggcaacccccgcattcggctcagttaaaccttaccaaatgaattgctcaaagaccatattcatctagctttcacattatccgcttgcacctgaccggactctcttaaaatgctactgactaaattactcatcttttcatcgcttgtattaagtagtacctatcataattaaagttcaattaaaagtcaagcaagactattcaaaaaaatcagattattgtttaagtaatggcctaatcgacccgaatgtcagcaatccacgcatctttttcgttatctgcatttaataattccggattatcagctaacggtgtgttgacgtttactaattcaccagctagtggactgtcaagatcttgtaccatcttctcagcttcaatggccactaaggtttcattagccgtcaatttttgccccacgattggaacatcaacaaacttgattaacccaaactcattttgtgcggctttggtgatcccaattcttctaatcgatgctgcaatttcctctgtccaaaaataatcattattattcatcgtcatccgtcattcactcctagaaagtatcttcagcttcactgaacatgtaactcttataatggtaccgcatcgacatgataaacccaacgccaattaggttccccaataatgacgagcccccttgtgagatgaacggcaatggaatccctgtcaatggtaataaaccaacgctcatcccaatgttttcgaaaacatggaataagatcatcatgatgaccccagttgagacatacgcgtaaaattcattcttcgtatcaaatgtgacccgaatcatttggtaaatcaacaagaagtacaaaagaatcacaaaacatgaaccgacaaagccgaagttctcaccaatgacagagaaaatcatatcggattcacgtactggcacatggacttgcacttgattgaagcctttcccaaatagctgaccagacccaatcgcttttaaactctgcgataattgtaaactggtactggcagtattatcaaaaggatgcagccaagcatcaattcgattgaattggtacgttttaaagcccagatgcgtcaagattacccggccaggggtcgtcgccgctagtgtaagggccgtgcccccaacagcgactaagacagcaatggctggggctaaaatcttccaggtcacacctgagacaagcacaatcccacctaagatggcaacgaacactaataaggtcccaaagtcattttgtaatttcaataggaccatcactggaagtgtccatagtaacattcgtccaagtaacatccaatccgtcttaaccgtgtgttctggataagccgtattgtgttgagtaacgaccctgcccaacatcaaaatatatgccggtttcatgacttcagatggttgaaatgagattggtccaagagagaaccaactctttgccccagtttgcaaggcgactgcccgattataaaagattaaaacggcaatcaagaggaaaatccctaacccataagccagtggtgcaatccgccatagttgttctgaatcaaactgcataattgcgacaatcgcaattccaccaatcacgtaccatgcagcttgcataataacggctcgagttgaactcgcacctgatgtatcatgtgacgttgccacatagattgacatcaagccaatcaacgctagcataaagactgaaaagacgattccataatcaactcgcgaggaatcttctgttgtttctacttcctttggcatgctaagtctccttcaatcaattctgctctcattatataaataacccggccagaattctgccgggttactgtaattctaattaattcttaagaattaaccttggtgtaagtggtactcccgtagtaattcgttaactgcatcgtcgtgggtcttagtaatgatactttgaccagtcccttcaacagttgcttcaaaacgtttcttagcgctatcttctacaatcacgccaatttcatttttgccgaccatgacgcttgtcatttcttggccattacgtttgatgtcatcaattgtgacagtaattttttgttctttttttgacatagttatgttgaacccctaacttctttgacttacttttgtgactcgtcttgctgtcgattgcgcaaaacggtgaaatgatctggtactggatcatagccgccccgtacaaacgggtgacaacgcaatatacgaccgatgcccatgattaaacccaaaatagcaccatgtttttggattgcttgaatcatgtaactcgaacatgttgggtaatatcggcaactcggtggtaataatggtgaaattcccttctgatagaaacggaccaatccaatcaatattttccgcaatttatctacctcactttagcgcatgctactgcaagaaattaataatatgactccatgtgctaggcaagaaaacggcaaatggattctggccgccaattgcaaaaccaatcatctgaccaactaataacgcaataattatgagcacgaaaaccaataaaattttctttaaaacgggtttgacgtgttcgtcaaaatttgattgatacacacaatcacaatccttctttaatagaatgcggcttaataagcgcgtttatgttcaatattatctaataagatgccagtccctaaagcaacagcatccaatggattttctgctaagaccaccggaaccttcaaatgttctgagaataagctagcgatattgcgtaataaagcaccgccacccgttaacatgattccccgatcaataatatctgcagataattctggtggtgtcacttctaacacttctttggcagccgcaataatttccatcattgtttcatgcaaggctgattcaacttcatctgcactaattgagacagattgtggcaacccacttaccatgtcccggccacgaatctcaagtgactcactcgcatcagcatgccaaacgttaccaattgttaacttaattgtttcagccgtatgttcgccgattaatagattatgtttcttcttaacgtatgcggcaatttcactattcatcttatcgcctgcaagacgcaatgaacgacttgtgaccacttcacccattgaaagcacagcgacgtcactggtcccaccaccgatatcaataaccatgttaccgcgtggttgaaaaatatccatgccagcacctacagccgcgacttttggttctaattccaagaagactttgccgccacctgatttttcagcagcttcaacaattgctttttgttcaattgatgtaatatttgttgggcagcaaatcaaaatattaggttttgataggaagccctttacatttaatttattaataaaatacgctaacatttcttctgtaatgtcgaaatcagcgatgaccccatcctttaatggacggacagcgtggatattgccaggtgtccggccaaccatccgatacgcttctgagccaactgctaaaacttttttggtttgggtatcaatcgcaacaactgaaggttcgtttaagacaatgccttttcccttaacgttaattaagacgttggcagttcccaagtcaatcccgatatctttagccatttggtgttgctccttccgagaactatattcagtaaatcattataccataagacaggtacctttagtatcctgatttggcaaaataaaaaagcgacgtccgctgaaatagcaggcgccgccagtctgttttatgcacgttttgcttgtttaatccggtgaccggcagcatcaaaatcagctcgactaatatgtgccccaagtgcccgtaatttttgatggaaatgatagtaaccccggtccatgtattgaaggttcgtaaccaacgtttcaccattagctactaacccagcaatgacaagtgctgcggcagctcttaaatcggttgcagccacttcagccccattgaaatgtgtatcgccataaagcacaactgattgaccttcaatttgataatccgcattcattcggcggagttcttccaaatgcatgaaacgattttcaaataccgtttcggtcataacactcgtcttcttagcaagtaattgaagtgtcgtcatttgtgcttgcatatcagttggaaagcctggataaggtagcgtcttgatattacatgcctttaattcagcgggaccaataattcgaacaccagcttcttcgtcaatcacttccgcacccatttccactaattttgataggagtggtttattgtgttcagcaatcgcttctttaatcaagacatttccttgtgttgccgcagcggctaccatgaaggttccggcttcaatccgatcttgcacgatactgtgatccgtcccgtgtaaagcggttacgccttccacccgaattgtctcagttccggcgccaaaaacgttcgcacccatcttgtttaagacattagcaagatccacaatttcaggttcacgagcaacgttttcaatcaccgttgtcccttcagccattgtcgcagccatcatgatgttttgtgtcgcaccaacactaggaaaatctaagtaaatattagttcccactaggcgttctgctttagcttcaatgtaaccatgattttgatgaatggttgcaccaagtgcttcaaaacccttcaaatgtaaatcaacaggccgcgaaccgatagcacaaccacctggcatcgcaactcgtgcgtgacctaagcgcgctaataacggccccatcacaacgatggaagcacgcatttttgaaacatattcaaaagctgcttcaaaattcaaatcaccactggcatcgattgttaattggttccgttgttcatcaaactcaactttagcatctaaactctttaatacatcttgcatcatgaagacatcagataaaataggaacgttcgttaattgaacgggtccgtcggttgctagtaaggcagccgccataattggtaatactgcgtttttggcgccttcgatttgaacttcgccaactaatcgttgaccgccttgtataatcaatttttccaagagtttccctccgaataagactgctagtttatgggactaaaaaaatcacatttttagcctgcgcgattatttctaaaaagaattggctaacggtgtagcccatcacaatagcgagaaatactatgacaatctgtacttgacggatatgattcggtttgaaaaattgctcaaaccggattgattgtaagccataaaaactgattaaaataaaaccaatatggctaataattgaaataactgcctgtaacccgattgattgcacttaaataacgccccttttgtgatatgcaaacattgtaacataccaaaataggatttgtctgcccaccagactgaatcttaagaaacaaaaaaagccttaaaccattcaggtttaaggctttttgaatcctacaataagtgattcttaacgttaatccggtttatcgcacgttgcagtgcaatttgagcccggcgtaattcgtcagtatcattatgttcggacgctgttttaattgcgttttgagcacgttccttggcactttgcgcacgcctaatatcaatatcacgcgcccgttcagcactatcggcaacgattgaagcaacgttatggctcacttccatgaacccaccattgaccgcaattgcgtcttcacgtgctggatcatcagtccgtttaacgcgaatctcaccaatttctaaaggggtaataattggctcatgattagccataataccaagttgcccggccatcgctggtacaaccaacaatgttgcgtggtgatcatagacaatcccacttggggtcacgatattaacggttaataccttttgttcttctgccatcattaacgcccctttctaagcttgtttcgttttttgttcggatggtgtataacccaattctttagcttttgctaatgcagcatcaatattcccgacaagccggaatgcttcttcagggacatcatcatagtcacccgctaagatgcctttgaagcctgccactgtatcttttactggcacgtatgagccggcttggcctgtgaaggcttcggcaacgtggaagttttgtgataagaagaattgaatccgacgagcacgcgcaacgataatcttttcatcatcagataattcatccatccctaagatcgagatgatatcttgtaattcacgataccgttgtaagacgtgttgcacttctgaagcaacttcgtaatgttcttcgccaacaatttctggatccaaagcactagaagttgattctagtgggttaacagcaggataaatcccctgttgtgttaatttacgatccaagttagttgtagcatccaaatgcgcgaaagttgttgcaggcgcaggatcagtataatcatcagcaggcacataaatggcttggattgatgtaactgaaccttttttagtagacgtgattcgttcttgcaattggcccatttctgttgccaatgttggttggtaaccaacggcagaaggcatccgtcctaataaggcagaaacttctgaaccagcttgagtgaatcggaaaatgttatcgatgaacaataacacatcttggccttcaacatcacgaaagtattcagcaattgttaaaccagtcaaggcaactcgcatacgagcgccaggtgattcattcatttgaccgaaaaccatcgctgtcttttccaaaacgcctgattctttcatttcaaagtataagtcattaccttcacgtgttcgttcaccaacaccagtaaagacagaaataccaccatgttcttcagcgatattatggattaattcttggattaaaacggttttaccaacaccggcaccaccaaacaaaccaattttcccacctcgtaaataaggggcaagtaaatcgataaccttaatccctgtttcaagaatttctgaacttgtatttaattcctcaaatttaggtgcagaacggtggatactgtcccgtctaaaatctgcaggaaattcttcgccgccatcgattgtttcaccaagaacgttaaatacccgtcctaaagtttctttaccaactggtacgttaattgcacgaccagtgtcttcaacagccatcccccgacgtaaaccgtcagttgattccattgaaatagtacgcattaccccatcacctaattcaagtgccacttctaagacgacagattcgtcgttccctttgttgacaaccaaggcattattgatatctggtaaagtcgtatctaaagaaaattcgacatcgacaacgggaccaataacttggacaacttttcccatactcatagttgttattttcctcccgcgtttcttattctaatgctgccgcaccaccgacaatttcggtgatttctgtagtaatctgtgcttgacgtgcccggttaaatttaattgataaatcagaaattaaattattagcattatcagtggcactcttcatcgccgtcatggaagcagaatgttcagctgttttagaatcaagtagtgcgccgtaaatcaaactttcagcgtattgcggtagaatggcatctaaggcatcatcaacagaaggttctgtgatgtattcttgatctttatcagtgacttctgaaacatccaagtcggtaataggtagcattttttcagctcgaaaagcagatgtcagtgagttgacatggtggttgtaacaaacgtacaactcgtcaaacacgccgctatcatacattgcaacagctgttttgatgatttcacggacttcattaaatgatggcacatcacttacaccacgatattcgtaggataagttcatttgtcgtgctttaaagaaatcagcaccagtgccaccaacggctaaaatagcatattcatcggcagacttgtggttttctgaaatcatttcaaccattgcttttaagattgagctgttataagcgccaaccaatccacgatcactcgtgatgaccaaataaccggtctttttgattggtctttccactaacaaattacttaacgtaatgtcatgccgcaatgatttctgtgaagtaccgttagtagcttctgctgctttagcggtacttttttgacgtgcacttgcaattaattgacttgcagccaaatgcgtgacgatttctcgaatcttattcgtatattgttgataagcgattgaatttttttcaatctgagaaagttttgcaccagagaccatttgcatagcactcgtaatttgcccagtttttttagtagaggcgattcttcgtttgatatccattaaagattcagccaattaattcaccccttactgtcctgagtcttgattgtcagcagtagcttcagcgccgacaaaaccttctgtgaaggatttgatagcagcatctaacttatctgtatctggcaatgcagcggtttgacggatagtgtccatcaagtcctttgcgttactttcaagataatcgctcaattgactttcatattgcatgatatcgtcaactggaacgtcatcaataaagccgtgtgttaatgcataaagaatcgttgtttgttgttcgaatggtaatggtttgtgaagtggttgtttcaaaacttcaacagtccgtttaccacgatttaatttcgcttgtgttgccgcatccaagtctgaaccgaattgcgtaaaggcttcaagttcacggtatgatgaaagatcaagacgtaatgtcccagaaaccttcttcatcgccttcgtttgcgctgcgcccccaacacgagaaacagatgacccagcatcaatcgctggacgtgttcctgaatagaataaatcactttccaagaagatctgaccatcagtgatggaaataacgttagttgggatataagctgagatgtccccagcttgtgtttcgatgattggtaaagcagtcattgaaccgccacctaattcatcacttaacttagcagcccgttccaataaacgtgaatgtaagtagaagatatcaccagggtaagcttcacggcctggaggtcttctcaaaagtaatgaaatttcacgataagcagcagcttgtttacttaaatcatcatagacgattaagacgtgcttgccgttatacatgaattcttcacccatcgctgcaccagcatatggtgcaatgtagagtaatggtgctggttgactaggaccagcttcgacaacgatggtataatccatagcgccgtaacgacgtaaggtttccacttgcgctctaacggtcgattctttttgaccgatcgcaacgtagatacaaatcatgtcttgatctttttgattaataatcgtatcaatcgcaacagatgttttaccagtcttacgatccccgataattaattcacgttgaccacgaccgattggtaccaaagcatcaatggctttcaaacctgtttgtaaaggttctgaaacagattgacgtgccataacgccaggggccttcttttcgattggacgagttttgtccgttttaatttcgcctttgccgtccacgggttgacccaatggattaacaacacgaccaattaaagcatcgccaacaggcacttccataatccggcctgttcgtttaacttggtcaccttcacgaatgttttcatattcacctaagatgataatcccaacatcgttggtttccaagttttgcgcaaccccgtatgaaccgttagaaaattctagcaattcacttgaaagggcgttttctaaaccgtgagcacgtgcaatcccatcaccaacataagtgacagtaccgacttcttcaacggctaaatcttcattataatttgcaagttgttgtttaattaatgcactgatttcctcagttttgatgctcatcaggttcacctctttatcaacgattgactatttcaatagtaatgacttaatttgatctaagccatgtttaacactgccatcgatcaccttgtgattcgattccagtacaatcccaccaataatatctggatcaacgatactttccactaagacctgattgagaccttcgcgtttagcgtagctttggctaatctttgcgatttgatcaccatctaaagcaacggctgacgttaccttagcgtgtgcaatccccatcttttgatcataaagatcttcgtaggccgcaataatgtatggcatctcagccattctttgatagtcaaaaacaaggcttaaaaagtgttgcatgagtgtactaaattcaccggaaaggctctttagaagctcacgttgtttcaatccagataaagtcgtatcagtcagaactgcacccaatcttgggttgtcattgaaaatagtctcgagtgcttgtatctcttcatggatactttcaaattgttgctcttgttctgcaagggaaaataatgcctttgcatagcgttgtccgactgcatatttatctagtttcattttgcttgtccaacccttcaatataggaattgatcaatgacttttgatcagtaactgacaattctttcttaatgagtttagaagcaatttcaatagatagttgagcaacatcatctctcgcactgtttaacgcatctaaacgagattgttcgatgtcttttttagcattttgttttaaagtttggacttcttcttgagcaagtgtgaccatgccttcgcgttgtttttcaccatttcgcttggctgtattcacaatttcaactgcttctgacttagaattcttcaactctgttgcgcgttgtgctgctaatttggcagcatcttcacgtgattgagcggcgttatctaagtcgtttgtaattttgtcagaacgagcttgcatcatttttgaaacaggtccgaacgcaaatttaccaactaaagcgactaaaataataaagacaactaatacgaaaagtgaatctccaaggtaggcttcagaagcaccaacgattaaattactaaacatctattgacactccttccttgacttactgactaatttttaaagcgaaaatttagattcactcggattaactaaataagatcaagaaagaaacgacgatagaaagaattggaacagcttcaatcaacccaacaccgataaacattgttgagcgtaattctgctgataattctggttggcgtgccatactttcgattgtttttgagataaccttaccgttaccatatgatgctgcgaatgctgctaaaccagctgcgatagctgctgctaaatagttcatgttttttcctcctaatttttagtcttccatttcaactttttctgaaatatagactatcgataatgttacaaatacatatgcttggattgccccgataaagacggagaatccttgccaaaccatttggatcggtgccgtcacaagcatcgttgctggtccatgtgagaaggccattttaactaataaacttagtaaaacttcacccgcaaaaatgttcccgtacaaacgcaaggacaacgttaagaaattggtaaattgttcgatgatattaattggtaagaaaaatcctaccggtttaatataactcttcatgtaattaccaaaccctaaccgttcaacactaaagtagtgcgcaatcactaagacgatcatcgcaagcgacatagtgataatcggattggccgttggactcttcaaccaagttacatcatgtaccttaatttgaagaatcaaaccaagttgattactgataaatacgaacatgaacatgacgaatgcaaataagtaaaattgtttaccttcttcaccgggcatcgcacttttaacgattccgttcgtaaaatcaatgatccactccaaaatattctgccgtttagtcggtttaagcgcaatttttcttgataaaaagaaaacgagtgcaaaaaccaaaactgcacttactaagaccgatagacagtttgctaaattaaaacgaattcccaaaatgctaataatgggatatttatcatccacaaaattccctcctcccttaggcttatttgttgattccactctatcaacgactacgtctacgcgagttgcacaacgaacctaaaaacagcaatatttatgtagaaaaattaagcataaatcatcaccgcaatacaagtatgataataccaccattaaattaaaagtacaaagcaaatactaactaatttctaattatttttttgtcaatgcactcaaataccataaatattatcatatcaaaagattaaacttattaacggttgcttttttggcaaaaaaaacgcgtaacacaggaaaatcaagtgttgcgcgcttttattatcggtacctaattaatggctatttagtcccgaaaagacggtcgcctgcatcccctaaaccaggaacaatgtatccatcctcgtttaaatgatcatcaagaccagctgcatagatgtcaacatctggatgggcttcttgaacagctttaacgccttcaggtgcagccactagtacaacaaggcgcattgacgttgcgccgcgttttttaagggcatcgatggccatgattgctgagccaccagttgcaagcattggatcaacgatgaatagttgtcgttgatcgatatctgttggtaatttaacaaagtattcgtggggttgtaatgttttttcgtcacggtacataccaatgtgaccaactttagcggctgggattaattctaaaacgccatcaaccatcccaagacctgcacgcagaattggcacaacggctaattttttaccgctcaattgtttttcaattgcaggccccattggtgtttcaacttctacgtcttccattgctaaatcgcgcgtgatttcataaaccattaattctgcgatttcgtttgcgacttcgcggaaaactttagtacccgtatccttattccggataatcgttaatttgtgttgaattaacggatgatttaatactgtgaattttgccatttactttgcccctattctattcaatgaatttagtccaaatttttttcgcaaaaaaagagtgactccaaagaaaaccttctccgagtcactctcccttccgcgtaaaattctgtttactattgtagcgtaaatagcatcaaaaaactagcggtattcattaattaatctaaaaatttagcttgtgtgattggaaaatgatccgtcaacgctaaaacatctgcactaatgcgcgtcatggcgtctaattgatcgtgtttttcaatcacttctaaaattaattgcgcaatcaattcacaatccgcttctttaaacccgcgcgatgtgattgctggggtcccaattcgaatcccacttgccttaaatggacttaatttttcaaaaggaatggtattcttattaacggtaatgtggacactatctaaaaatgcttggacttccttcccatttaagccactctgcgttaaatcgagtaacattaaatgattgtcagtcccgcctgaaaccacacgtactaagtcagattgttcgaaaacgccagccatcgcttgcgcattggccacaatttgttttgtatatgctgtaaattcaggttgtaaatcttcaccaaatgcaacagctttcgccgcaatgacatgttcgagcggtccaccttgaataccagggaagatggcagagtcaattgctttggcatattctgctttacacaaaatcattccaccacgaggtccacgcaacgttttatgcgttgttgtggtcaccacatcggcatatggcactggacttggatgaacaccagttgccactaaaccagcaatgtgtgccatatcgaccattaaataggcaccgacatgatcggcaatggcgcgtaatcttgggaagtcaattgtccgactgtatgctgatgcccctgcaacaatcattttaggatgaatttcatccgctttagcagcgagcgcatcataatcgattcgttcgttatcgtcagcaacgccataactatagaagtgataaagttgcccactgaagttaaacggtgacccatgggttaaatgaccgccatctgtgaggttcatccctaaaatcttatcaccgggttctaaaagcgcttggtaaactgccatattagcctgcgaaccggagtgcggttgtacattggcatgttctgcattaaaaagttgtttagcacgttcaatcgcgagtgattcaatttgatcgataaattcacaaccaccgtaaaaccgtttgcccggataaccctcggcatatttattggttaatacgctaccttgtgcttcttgaacagctccggaaacaatgttttcagaagcaattagttcaatattatgcacctggcgttgttcctcttttttaatcaattcgtaaatttctggatcagtttgttcaatcatttacaatcactcctcttcctattaaaatagtgcctatttcgaagtaaagtattgttggccggcagacttctcgaggcgattcatatacgctaatccgacaccctcttttgcgaagccttgcactaatataattttaacctcaggattcaaatcaaaataccgtaatccttcaaacaagtgttgactagcagtcactacagaatcacctaaagagaactgatctttaaacctaacgtcagataactgccctaacaccgtatcaaccgccataacaccaaatggcacactttgttgactggcccatttaaccgccgccggaaattcatctggcgttggcactatgtaaacctgtgcatttggagcatagtgtttgtatttcatgcctggtgcctttggcgtttcagctgcgccaactttatggtggtttgtcataatcggcccaatcacacgttcaatggcttcttgagtcacaacaccgggtcgtaaaataacgggtgtcgcaacacttaaatcaatcaccgttgattccaacccaacaccagttggaccatcatcaatgacaccggcaatctttccatttagatcatgtaaaacgtgatcggcagtggttggactgggcttgcctgatgtattggctgaaggccccacaagtgggacaccggccgccttaatcaagtctaacgtcaccgcattgttcggcattctaaaggcagcggtctttaaaccacccgtcacaactgaatctagtgccgcatgttttagcggcaaaataattgtcaatgaaccgggccaaaaagcgtcgactaattgcttaaatcgatcactaactccggctgcgtaatgctcaaccgtcgcaacacttgctacatgcacgattagcggattatcacttgggcgccccttagcggcataaactttcttaaccgcttcaggattcgtcgcatctgccccaagaccatagacggtctcagttggaaatgaaatcaattcgcccgcttttaaatctgctgctgcttgttcaatctgttctactgtgtatctcttggtttccattataggccttccttactctacttctgatttacatcataccaaattccgattgaaatcgtaacccacacgggccattctagaccaattagccatatcttttttgattgtaaccgctacatcggtcgattcatgttcgaataaccgaacgatcgcctctttttgctgataaccgaactctaaataaagctgcccatctggttttaaatacgcacgcacttctttagcaaaccgttcataaaacgctaagccgttattatctgcaaatagggccaagtcgggttcgtatttcaaaacggacgcatccatcacatgccgttcatcttgtgcaatatatggcggattagacacaatcacatcaaactgttggcccatcactggggttagaaaatcacccacgataaagttaacatgcgcgtttaattggcgcgcatttgcttgtgcaacagcaatcgcttctagtgaaatatcaattgcggtcacttcccattctggatgctcacaggcaagggtaattgcaatggcgcccgttcctgtcccaacatccaacactttaagtggtcggttctttggttgtgtagcatctaatatccattctaccaattcttccgtctcaagtcgtggaataagcgttgccggcgtcaccttaaaatcgcgtccgtaaaaattagcatatcccaaaatgtattgtgccggttgatcagcgataaacgcgtttaagtctgcttgatactgatcgtattcggcagtcggcatttcatcgtgataatgcaagaccagttgggtcgtcgtccaatgtttacgaccgagtagtaaaaagcgcgctgcttcacgttctttagcgtgttcttctaaaaataaaaaagcccaattcagggctttaagataagtgagctgtgccatcttgtaattgctccaatttttcggtttgatcgtaaagaattaacgcatcaatgacgtcgcctaattccccgttcataatccgatctaatttgtttaacgttaaaccaattcgatgatccgtcactcggttttgtggatagttatatgttctaatccgttcagaacgatccccagacccaaccgctgacttccggcttgaatcgtattcactttgattttgtgattcatagaaatcataaacccgtgactgtaagatttgcattgccttcactcggttttgttgttgtgaccgttgatcttgcatcgcaaccacaatcccggttggaatatgcgtcatccgcacggctgaagaggttttattgatatgttgaccaccagcacctgaggcacgataaacgtcagtccgaatatccttaggatcgagctgcacgtcaaccccatcatattcaggcataactgcaacagtcgctgttgaggtatgaacacgaccttgtgattcggtctttgggatccgttggacacggtgcgcaccattttcatattttaacttcgaataaacatttttaccggtaatcatcatcgcaacttctttgaagccacccacttctgtagccgtttcatcgatgatttcagtttgccagttttgtgattcagcgtagcgttgatacatattcaacaaatcacctgcaaagagactggcttcgtcgccaccagcagccccacgaatttccatgatgatattcttttcatcgttaggatccgttggtaacatcaaaatcttgatgtcttgttctaattgttccttttcatcttgtaactcacttaaatccgctttagctaattcttccatttctgggtcattagattcgcgtaacaattcttcgctttctgcaatgtcgtttaagacagtcttcaaacgcgtgtatttaccaacaatttcccgtaaacccgcttcttctttagacaattccatataccgactggtttcgttgatcacttctggatcagacattaattcctgtaattccgcatagcggtctaacaaactatcaagttgttcaaacattttatccatgaatgactagccttccttttcactctcttgtgttaccggtgggttaaaatagtgtttccgacaaacggggtagtatgcttcgttgcccccgatttgaatctgttcacccgtataaaccggtttgccatcgttcattcgcaagttcataatcgcttttttgcgacagaaccaacagatggtcttcatttcttcaatcttattggcaaatagcaataagtatttcgagccttcgaataattcattcttaaaatcattcttcaacccaaacgccatcactgggatattcaaatcatcaacgacctgcgccgcttcgattacgtgatgccgttctaaaaattgtgattcatcaatcaagacacacgctgcatccggattagtcgattgtaccaactcaaagatattcgtatccgagaaaatcggtgtcgcctcacgtttgagcccaatccgacttgaaacaatccccaccccgtcgcgattatcaatcccactcgtcaggatgatcactgatttattctgctcttcataattgtgtgcgacttttaaaatttcaatcgacttaccactattcattgcaccatatctaaaaaataattgcgccactctcaaacacccctatgttaagcacattttaatctagtatacctgaaaatcagcgaggcaacaatattcgccactattaaattctaaagtttcccttattttatttgcagatgcgtttttatatcgtccaaattgagaatttatgctatgattatgaacattgaaagggtggcaagcatgacaattaaaagctcatttgcaattacagcaggacgtttttcatattggtatttacatacctttatgaaaggtggcagctccctccccgggaaaatcgcaaccaagttcgatcctgctgtgttaaagcagttaaccaagaactacgacgtgattatcattaccggtaccaatggtaaaacattaacgaccgcactcactgtgcagacgttgaagcaaaaatacgatcatatcatgaccaattcgagtggctcgaacatgatgcaagggttgaccaccgcctttttagcagatcatcctcaaaaaggacaacggcaattggccgtcctcgaagtcgatgaagccaatgtggaacccctttgtcactacatcaagcccaaagcgattgtgatgacgaatattttccgtgatcagatggatcgtttcggcgaaatctacacgacttataatatgattctagcgggcgtcaaactcgttcctgaggcaaccctcattatgaacgctgacttgcctctcttttcatcggttgaacttcctaatccaaagatttattacggattcaaccacttaccagatggcgaaatgatggctccaagcaacacagacggcgttttgtgccccgtttgtgatcacatcattcattacaaattcatcagttatgccagccaagggaagttttactgccctaattgtggctaccaacgacctgaattagacgaagcagtcactgccatcaatcagatgcaccccacaaattcacactttgaaattaacaacgaaccgtttgaaatttcaattggcggcatgtacaacatctataatgcacttgcagcctatagtgtcggtcgattctttgatattccagtgaaagcaattcaaaaggccttcactgaagacaaacgaatctttggccgtcaagaagtcattcaattaaaagacaaagcggtcacattggtactcgttaaaaatccggttggcttaaaccaagtcttacaaatgatcagttctgatccagaagacttttcactcgcaatgttgcttaatgctaactatgccgatggaattgatacgagttggatttgggatggcgagtttgaagacttactcaaacacaacattccaaccgtgattaccggtggcgaacgcggtgacgatatcgctttccggctaaaagtagccggtgtcacggcagatcaattacacgaaactaaagaactcgatgcaacgatggcagccattgaagcagccccaaccaaacatgtttatgtattagcaacttataccgctgttttacaactacgtaagaagctggcagctgccaattatattaagaaaggactatcagtatgacccagacattaagaatttgtcatctatacggcaatttaatgaacacatatggtgatcttggtaatattttagtccttgattactatgccaaaaaagttggcattcaaactgaaacagaagtcattagtatcggtcaagatttcgatgcaagtcgttacgatatcgttctcttcggcggtggccaagacttcgaacaaaaaatcatctcagaagacctcaacgacaaaaaagcagccctcaccgaatacattgaaaacggtggtgttatgcttgccatctgtggtggttatcaattattaggtcactactatattggcgcaaacggcgacaagattcctggaatcggcgcacttgatcattacacattgagccaagataacaatcgttttatcggtgatattgtcatcgaaaaccgtgagtttaacgaaacctacctcggttttgaaaatcacaacggccggactttcttgggcaaggatgaaaaaccacttggttacatcaaacgtggtcacggcaacaatggtgatgacggcaccgaaggttgtgtttataaaaacacatttggttcatacttccatggtccaattctcacgcacaacggtgttttagccaaacgacttttatcgattgcggttagccggcgttttccagaatttgatttacaacaaatcgctgacttaccactcgaagaatcacgttaccaagtcgatgcagccggcgtcaaacgcgtccaaaattaacaaatcaaaaagtcgaccattatgcggtcgacttttttgatgtcttaatcatttcgcaagaaaaaatacactttttattcataaaatgataatcgtttcacaatacttgctcggtatactgactttaacctataaaaaggagcgaatcattatgttaaatcaaatgccagcagtcgagtccgttcaaattaatcggattgaaaatcatgataaagttttcgcaaccactgaaagtggtcaagaaatcgaattacatattaccgaccaacaaaaaaaggaccgcctcttctgggaatccctcatcaatatcctccgcgctgaattgtggttacccctgcaaaagagaacccacgaactactccaaaacgactggctaacggtcgatggctaacgtgtggctctgggttcggatgacttacagaacacgtttaaacgatcagaacacaactatccaaaagggcgctaacaaaaatattgttaccgcccttttgcatatcaatgtttcgttttttagcgttgccctgtccactccgctaaatactgatccacaaactggtgcatgaaatccgttcgcgcttgcgcgatttcgcgcgctgcctgtgtgttcatcgttgctgccaatttaaataatttctcataaaaatggttaatcacggtagacggttcgcgatagttttcctttgtcaattccgcccgtggttgaatctcaggatcataagcaaccccatcgtgtgcgccaccatacatgaaggtccgcccaatcccaatcgcgccgattgcatctaaccgatccgcatcttgaacgatttgcccttctaaacttagcgtttggtgttgattgagatttttcgaaaaggacatgtggtcgataatatcaaaaattgccgtttgttggccatcttgtatgccgttttcggttagtttagtttttaccttttgtcgagcctgttcaacatcagtcgcgattttttcatcaatcacatcatgcaataaggccgccaagataatcgttgttaggtccgtagctaactctttttgctgaattaaacaggcattattcacgacccgttgaatgtgatcgaatccatgaccgctgtgttctgctgccaattccgttcgtacaaattgttcaattgcttcgatttgtctttgcatacttgtcatcctactcttttaatcattaaaaaaaattgcaactacggctgcggttgcaattggttatattcagtttacttgttacccggttctgacgcaataatttgcatgtcaccttttaagtcccatgacttaatatcaaatggtaacacaaaatgcatattcttgtgaattgggtaagtttgcccatcggcaatcagttcgccttcaccatcgaccacggagactaaagtatagggtgccgttgtccgatcaaagtgtaagtcgcccttcactaaccattggtaaacactgaaaaatggtgacattggtggttgcacataagtcgtgattgttgaatctccaacatgttctgtttgaatattcaaaacgggatcttgatgcggcacaatcgtcgtatcaattgattgcttcaagtgtagttcgcgtttttcgcccgtcttagcatcaacccgatcataatcgtataaccgatatgttatatcactactttgttgggtttcaagcgccataatccctttgttcaatgcgtgaatcgtgccacttgggacgtagaaaaagtcaccagtcttaacgggcactttgcggagtaaatcatcccacttgcctgcttcaatcattgctgttaattccgctttggtcttggcatggtggccatagattaaataagcacctggttcagcatccaaaatataccaacattccgtcttaccgagttcggttggaccttcatgagcagcagcataagcgtcatctgggtgcacttggacagaaagacttgcttcagcatccaaaatcttagttaacaatgggaatactttaccttctgcattaccgaaatattcgcggtgggttgcccatgcttgatctaatgtgagcccttttaatgggccattttcgatggtactaggaccatggggatgggctgaaatggcccaacattcaccaatatcgccgtctggtaaatcataatcgaaggcttcagctaatttgcgaccaccccaaatttttttttgaaaaacaggttttagaaataaaggttctgtcaattcactcactcctaatgcgctttatttatcaatagtcccattttaccacaaatgtaagcggataatacgcaaatttgcgaatttgactaggcttttgtttctaggtgattatccgctaaaaattgtgccacaatcgcatcccgttgttccaaaaagaccggattatcagccgttggatgaatgcgattactcaggacaatcagccccgtttgccgcttgcgatccaatagcatgaacgtgccggtaaaaccggtgtgataaatcagtggctggtgttcttgcggctcaaagcgcaaatcccagcccagtgagcgcccgagatgttttggtgtccaatcacgatagagactcttaacactcgcctgactgattggtggctggtcaaccttcaactgccctaattggaactgggcaaagcggacaacgtcttttaatggagcaaacaagccggctgcaccactatgattttgtaaaatcgcacttttcggatcgtggacagtgccctggattaagccgcgttcggcactcaattcagtcgggaccgccaaacttctgtccggattaaacgtactggcttgcataccgagtggggttaaaacgagttcttgaatcaaatcctgaatcggtttttgatagatggcttcaatcatccagcccaaatacaacatatcaatgtccgtgtaaacaaccttttcaccaaaatttgggccgaccgttaattgcgtcaaaagcgccgtttctaattcggcagccgataattgattccgattcggaatgtagcccgttaaaccggacgtgtgcgtcaatagatgcaagaccgtcacccgtcgatctttaaaggccggcaacaaactatgcacttttgttcgtaaagaaagccgccctttttccaatagccgcaaaacaatcgtcgtcgtgccaatcactttcgttaatgacgctaaatcatacaactgatcagcttttaacggcactttttggggcactaattcggcctgcccgattacattagtcatcacttcagggccttcgatgatggcataagaaacaccagggacaatcccttcatcaactagcgctccaatttgccggatggtttgttcaaatcgcatgttaaattcctcctactacatcagtatcactagtatacaccaaacacggacaaaaataaggccgcagattttatctgcggccttatttgcgtcattcatgattaaattttaacgttgcctgagaattgactattgtacaagtcagcgtagaaaccatcttgtgccatcaaactatcatgggtcccggtttcaataatcgaaccgtgattcatcacgatgatgttatcggcatcgcgaatcgtcgataaacgatgggcaaccacgaaactggtccgattttgcaacaagcgttccatggcgtgttgaatatgaatttcagtccgtgtatccactgaactggttgcttcatccaagatcaaaatctctggatcggcaacaaaggcccgcgcaatcgtcaataattggcgttgaccttgggagatattcgaagcttcttcattcaagaccgtctcatagccatcaggtaattgacggacaaaaccgtcaacgtgcgctgctttggcggctgctaaaatggcttcatctgaagcatcagcgttcccatatttcaaattatcccaaatcgttccagtaaataaccaagtatcttgtaaaaccatcgcgaagtgacgccgtaattgttcccgagtcatatcgcgcgtatcgacacctttaagcttgattgaaccgccactcacgtcgtagaagcgttccaacaagttaatgatggttgttttaccagcacctgttgggccgacaatcgcaatcatttggcctggtttgacttgcaagttgtaatccttcatcaagatatctttaccttgataaccgaattcgacatgttctaattcaagtagattttggtcatcaacaatcgccgacacttctgatgggtcgtcactcatgttatcttcatctaagacttcgaagacccgttcagctgaggcaatcgttgattggattgtattcgctaagttggccaattgcgtgattggttgtgagaattgttgcgtatattgcatgaacgcttgcatatcccctaaagtaacttggccgtgagaaacacgaatccccccgacaattgctacgaagacgtaaccaatgttattgacgaacgtcattaacggcatgatgaccccagaaataaattgtgccttccaagctgctttatagagtaatgcattttgttcttcaaaggcatcaattgtgacttgttcgcggttgaaggtctttaagaccacttgaccagagaaattttcttcaatttggttgttcaacaaccccaaacttttttgttgcgctgcgaagaatttctgtgatttcggtgcgacaatcccgacgacgactaaactgagtggaatcgtgactaaggcaattaaagtcaattgccaactaatcgagagcatcatccacataacgccaataaatgtcacagcactggttaccatttgcgttaaactttgttgcaaggtacttgcaatgttatccatatcattaatcgcacgactcatgatatcgccgtttgagtgtgtgtcgtagtaattaatcggtacccgttgcatcttgtcttttaattctttccgtaattcatagacggtttgttgggaaatccgcgtcatgatgaattgttgtaagaaactgaaaaccgctgatgctaagtacatcaaaatcaccgtcataataatgtgttgaatcttatcgaaatcaattggtaagccattcatcggcatgcccgctttttgcatggcattgcccttcataacacccttgaagatttcggtcgttgcttgtcctaatacttttggtgttctaatttggaaaataacggagatgattgctaaggctaacacaatcactaatccgattaaccggctagacatgtaggttaataatcgtttggttgtaccccaaaaattcttcggtttttcaacgacaccacccatgccacggcctgggccatgtccaccttggggtcgattggttgttgttttttcagccattagtcttcatccccctctctgatttgtgagttaataatttcttgatatgtggcgttattagccttcaattcagcatgtgagcctttaccgaccagctggccttcatccaagaccaagatggtgtcggcatcggcaacggttgatacccgttgaccaacaatcacaacgacactcttttgaatttcagcatcttcttttaaggctttccgtaataaggcatccgtcttaaagtccaacgctgagaaagaatcatcaaagacataaacagccgcttttttaaccaacgcccgtgcgatggcaagccgttgacgttgaccaccagagaagttgcccccaccttgttcaacgtgactatctaagccaccttcaagttcgctgacgaaatctttagattgtgcaatttcaagtgcgtgccagatttcatcatcggtcgcattcggattcccatattgcatattttcccgaatcgtcccggtaaataagttcgctttttgagggacaaatgcaacttgttggtgaatgtcatggagggtcacatctttcacgtttaaccctttgactgtcacttcacccgtttcaacatcgtaaaaacgaggaatcaagttgactaacgtggtcttccctgagccagtgcccccaatcacggcgactgtttggcgcgctgtcatttggaaatcaacgttttcaagcgctaagtgttccgcattttgataacggaagttgacctggttgaaagccaagcttgctggttgatcaccaaacgttttaggcgtcgctggatcttcaatcggcgtgtgtaaatcaagcacttcattaatccgcactgctgaagcttgcgcccgcgggataaagacgaagaccattgaaagcatcatgaaactcatgaggatttgcatcgcataagtcatgaacgctaataaattcccgacttgcattgcttgattggcgattaagtgtccacccatccaagtaatcgcaatgttagtcccactcatgattaacgtcatggctgggaacatcactgacataatactataaactttcttcgcattttgcgtgtagtcagtattagcttcatcaaaacgttcttgttcgaacttgtcgcgccggaatgctcgaatgacccgaaccccggttaaaccttcccggaaaactaagttaatccggtctgtctttttctgcattgccttgaataatggcacagcgaagtacatcaccccaccaatgaagagtgccatgattggtaagacaaccaagaaaatggatgtaagttgcgcatctttttgatacgctaagaaacttgcgccaatcaacatgataggtgccataatcatcatccgtaagaacatcattgccacattttgaatctgcaccacatcgttagtcgtccgcgtaattagtgaagacgtcccaacttgatccatttcatcgtgtgagaagttgatgaccttccggtagatatctgaacgtaatttttggcctaagccttgtgacgtccgtgccgcaagataaacgttgcagacggctgcaataatactaattaatgaaaaacctaacattttaaagcctgcttgccagatataatcaatattccccttagcaatcccgtcattgacaatgtcggaggttaaattgggtaaataaaggttactgacaacctgaatcgtcatgaataaaaccgcaccaaagacggcccaacctgacattcttttctttgcaagtttaagcatgttgtgtgtcccttctttccttatccttgtttgctggcccctgtttctaaccagcctaatactaattcgaagcgttcttggacctgttcaattgtaatcgcatggtcactttcttgttgcagataatacgctgcaatactttgaaagaccgtcgtcatcaactcatgaaataaaattctaagcgcttcgggttgatctgcgttaatcttgagcaagtcgtaattgacgttttcttctaaaaagcgcatcccatctacttgtttggcatgcattaattctggtgacatcttgcgctggttcttataatccatatgtaagaagaggtgcttgtaaaatggtgcattttcaccattaataatctcttctgccatttcagcaaagaattggcgaattgccttgaatagatcaccatgaacagccaacagactcttttctaaatcctgctttgaactgtcgcgtaataagctaaggtcgtagaaaaaaatatccgccttatcttcaaagtactgataaaaactgcctcgcggaatctccgccgttttaataatgttgctgacagatgcttcattaaacggtacccgtgaaaactcagcatgcgcagcttgaatcagtcgttgttgcttttcctcaggtaatctaaaaaatgttttcttcggcatttcgatactcctttctgaaaattaatgacagagcgtcataattgtgacgtaatgtcataatacgccaacttaggcactcatgcaagcattaaatccacaaaaaaagaaccggcagactatcgtctgccggttccctttaaaaggcgctatttatcgtctttgtccattttttctttaatatcatccatcacgtcgttggctttttcagcaactttgtctttggcatccgctaatttttctttagcttcacccataaagccctttgctttacctttggcctcagtttcgcgatcaccagtcaccttaccggctgtttcttgtactttaccggttacttggtctttcatgccatctaacttttctttatctgtcattcaaaatcactccttcttattggtctacctatatgataggatagctaaccaacattagtcaaaatttatgattatgagtcgcattatgtcagtttaccatcgcgcatcacgtattgatgatctgtataatccaagacgcgttcatcatgggaaaccatcacaatcgtctgtcctgtctctttcgtgattttagccagctgctcagcaacctgtaaggcccgtttactatctaaactagcggttggttcatccgcaaaaatcaaatctggctgaccatacaatgcccgagcaatcgcaactcgttgacgctgaccaccagataagctcgttgggtactgacgtcgttgatcccaaacacctaaattggttaatagttgttcagctgattgtggcgcttgcttttcacgtaatcgatcgactagttcgaattgttcttcaaccgttaaaaatggaaccagattcgaactttgtaatataaagccgaaatcgttaaaccgtaatgcagaccgctgtttttcgcttaattgactaatctcttgatctttaaaaaagagcttcccactcgttgggccttgtaaactacccataatcgttaataaggtcgtcttcccagaaccagatggtccggttaaaccaatgaactggcccttttcaatcgttaaatcgatttgatctaaagccgtggtttgctggtcgcctgcgccaaattttttgacgattttttctaaacgcattaaagccatcctatgcccctccaatcgcatcaagcggatcaatctttagaatccgccaaattgagaataaagcgccaatgactgtcatcacaagtaaaacagcagaaaaggccccaattagtaaaggattatttgtatacggcaccgccgctggtaataccaatgttgtcaatgcgttacacaacaaaccaaggccaatcccaatcacccctaagaatacagattgccacattaaactaccaactaattggccacctgaaatcccttgtgctcgcataaccccgtatacggccgttttttcaatagtaataatatacatgaaaatcccaacgataaaggcgacgatgactagcaatgcgccaatcatcaaaccaaacgtcttaacctgtggcccataccccggaatcttatcgattaattctggaattgtcagtttggtcagctgatccgttgtcttaatccgcgcgtttccctttaatactaaagcattaatgcgcgtaatctgatcagtgccgtagcgcattcggctaaaatcggtcaaccgcaaataagtcaccggttgcgtattatagcggtggttcgtcgtaatcccaacaattttgtacttttgttgacgcccattcaatttaatttgttgatttaaagcaattccttgtaagccgtcgtcgaccacaatctcatttgcctttttaggataccgtcctttttgcaacttaggcttcaaaaaagcatcaaaatcgataccaaaaacactcgtattttgcttacttaaacctgaactactcacaacacccatcatctgagcaagttgcgcatgatttttctgtgcacctttaatagagggtaattgatcaacatctaattcagaagcagccaagtttttattcgcatactgactaataacaacttctttggcgtgccattgatcaattgccgaacggttattattggctagcccatatgccaaccccgttaaaaaatagattaaatatgcaattagaaaaatcgtaaaaatgatcaacgaataacgtaatttagcatgtttaatttctttaattgctaaatacatccaaacacccctttcttaactgttttaatctaacataaagcatcgtgccttgaacagcaatccgcattcaatcttttattcattcacgggaatatgctatgataagcacacggaggtggtgcttatcaaacacgtcaaacatgggattgtctttttgcttctgattatcatccaacaagttcctttaatgattgtcagtggcttatcattgctccctaaggcccaacagacaacccatctaattttagtctttggttggctttttctaatcacgactatcggcattactgccctaatgtggtattactaccaaaaaattaaatcaacgcgttatgaccaacccttcaccaaacagacttggtggacaatgttgattggctttatcgcgatggttgctgtcaataacggtacaatcccgtttatgcatactaccggtaatgccaatgttgatgcactaacctcagtctttcagacgattggtattttcatgctaccatacgccctattcttaggtccgattatggaggaattacttttcagagggttcctaatgaattggtttttcccaggcacaccaatcatctcaatcgggttaagtgctatcttattcggattgatgcacggcgcaactgatccgatttatttcatttcaaaagcactgcttggcctaattctggctatcgtctactatcgcacccataatattaagagtaatattgccttacacatgttgaataacattactgctggctttacgattttttaaacgactagaaaggaagcatgactatgtctgcattaacaaccatcttaacttacatccaagaacatcctgatgaagtggttctagaaccgtttcaatatgcgaacgtgattcgctttggcattagtgaccaagtcgatctgccagatgccgagaaactgttccctgatatgcggctacacgttaaccggattgaccccgagtacgtcaaagaacaccatgacttattgacgactttttatcaacaaaccgaagaaaaacaaaaagacggcttccaagatgtgtggattactaccgcccatcttagtgaccgtcaactttatttagtggatctttcttttgaataagcctcattttgaacagctaaaggtcagctgtattaagtatgctattttaaccttgtttctctttgtcatgcgtgcctttattgcgcatcccatcattatgattgccagttggattagcactgctgtttgcggcgcatatttcattgccatgttaattgtttattattacggctaacgttgcatatgtttggtctcagcaatcacttcttctgtaaaatacaattgaaaaccaaagaacaccgtcaacataatcgcagctatccatgcagtgcgcacattgattaacttaacaattaaccctgagctaatagtaccaatgaagaagctaccaacaattaacccgaagtaccgggctttttgttggtagtttttttctttggtcgctaaatatagataagtattttcgattaatttcttataattgccggtcgtaaaagcattcgcatatggatagccattaaccgttgaataactcgctaattgcatggccatcgacatcgacagaatcggtgtcacaaacatgttgggaatcgcggttgataaaaaaccaactactactaaagcaataatttgaaaacctaataaccacaaccgccaaacattcaacccaccagtgttaaaatgccgcttcgccagctgcacaataataaccccaaacccaaatgaaataatgggtaatatcttttcaggaagttgtgcccactggttcgttgcgatatctaagccgatgaacacgatattaccggtctgtgcactcgcaaagacgccaccacgtaaaatcacacaatacgcatctaagaagccaccaagaaacgttaaaaacatcgccgtgcttagccgatcatgaaaccctatttctttttgcaacccaatccctccaaatcaatactcttattatacgcaaattaaaattgaaatcaaaaaacggattgcactatttcacagtcgaaataaggtacaatccgctttacactataaattaattgaattgacatcttgaccatggaccacttttctaaagtcgaccagtcctaagtccaaaccgcgcagcaatacttcagccgtcccgacgttggttgccaacggtacttcataaacgtcagataatcgaattaatgcattcacatccggttcgtgaggttgagcagtcaatggatctctcaaaaagattaccaggtccatcttattttctgaaatcaacgcgccaatttgctgatcgccccctagaggacctgacttaaaccgtgtaatcggcaagccagttgcttcaataattttttgaccagtcgttccagtcgcaaataattcgtgttgcgccaaaataggtttataagccgtcgccagtttcacaatcgttggtttctgacgatcatgtgcaattaatgcaattttcatctgaatccctcctaatgtctgcggtgtttaaccaccgtaaaaaagtgtaacacacttgccaatagaatgaagaagattaaaacgaatgacacataattaagccaaaactggccaattggcaacactaagttcactaattgttgcagtaccatcgtaatcaaggttgcacaggcgaccatgccaaatagttgtatataccgtttcactgtatcatccgtcctctttgctttagattgaatgcttgcgccgacttggcgacattccgcttgtttctgcgctgaaagtgtctttaaaccatacgtttttgtctggacaacttcccggatttttaaaagtccagctgcccccaagactttatcaaaagttctaaaagtcccgtcagtcacaccagtaaccaattcctcagctggactggcataacaactactaatcgtaatgtaacttttgcctttgaagcgatctggtaacgcatctcccgcccgattaaatcggactaaccgttgccgcacgcaatccaagaagtttttcatcacacccgacattgcacccccaataagttggcgcagccagtatccaaacatcggctgccaataacttagcttccagttcatccaataccggattggctttgccagcatctggtaatatttgataatcatttaaaaagatcacttcaacgtcatcttccggttttacacctgctaaaacggcatctaaaagttgcccattgaccccatctcgttgatgactgcctaacactcctaaaatcttcatctgatcaagcctcactctttatactactttcagtttacacttccaatcactaacttaccataaaaaaacgcccagaccaatggcctagacgttgtcattattttagtttagtaccaaccattacttaaccagaagctcttagcggtatcccatgaaccataacgacttgttacatattgatctgcaacgcggtcttggttagctgctgaataatcaccatttaagtatgaagctgataattgataacggccgattaattgaccgttacgtgctgaatatgaaccgcctgattctttttgtgcaatccattccttagatgaactcgttgtagttgtagttgttgtttgtgcagctacgggtgcttgttgtactggtgcagcttgaactgcaggttgtgcttgaactacaggggccggtgtttgaacaggtgtagctacttgttgagttacaacaggggctggtgttgttgccacttgatcagcatcaattgttaattgttcaccaacaaagatcatattaatatcagcaatattattagttgttgcgatttggttaacaagctctgtactaccattgaatttttgcgcaatggttgaaagcgtatcaccatttgcaacggtataagttgttgcggcactggcttgtgattggttaacgaaaagtaacccggttgttgcgacggttgttaaagcggcactgtaaagtaaagtttttaaagatttcatattttgaatggactccttattgtttaaattgatttttctatctgtttaacgtgggactaatataccatcttaaatccgttagtaaatatcaaaaccataacaattgatgacaaatccgtaacaaaatgacggcaatttcacctaactttgtaatgaagcccacaatttaattgacttgtaatcggcctaaaaggttataacaccaaggattacagtccataaaaatgctaaatatgctattttgaattaattaaccctctttcaaaaataaccgccctatttaacgtaataataagacgaggtgatcaaaatgaaagttttaaaattaaatgatttagatttaaacgtcgcattggatgatcgaatgattcaaatttccggtgctcaggacacaacattaattttcaaaagtaagctattagcacactattggttcttcaatttacgggctttagctaagattgcggatcgctatgcgatccaaatcatgtttgagacagagaactacaaataatttgccctatcgatataaagccacaaaaaaagagctgattactcagctctttctatcttaattgggtatatagggctcgaacctataaattccggattcagagtccggtgccttaccaatttggcgaatacccaatatcatcaacgaatactatgatactgcacactccagacgttgtcaattatgatttttaacaaatctttaaaagaggactatactattcttggaggtggttccaatgatgaaaaaagcagaaatcgaaaaattatttgacgggaaagttgccgtatatgatcaagaccacgttgtgattgattggatagattcacgcaggacgcttgaagtcacaattgataacgatattctaaatctactgataaaccatcaggactatattcggaatatcttgaaacatttaaagagacaaacaaatcgcactatgaccaaggaaattattaacattaatcgtcgtaactataaaatcttcatttagcctcgctagagtcaattaaccattgacattacaggctttattcgctaagatattagttgttccgaacattgcccgttggtcaaatcggttaagacgtcgccctctcaaggcggagttacgggttcgatccccgtacgggtgatatttaaaacagcctagaacccagaaaagccgttaaactaaggtttagcggcttttttgtttgtttaaaacgtgtaaaaaagctagcctcctgacgctttagttagggggctagtttttttattgcgtagatttcttctattaaaatggcttcatttgccacaattatttggctaccaaaccagccactgattaaaccttccaccttactgggtacaataccttctattgaacgttctgctttgtcgatttgaaccggataacatttaacaattgcgtcattgatggtattagcaatcatctcagcagtcatcgcctcaatgtgtttttcattgcgcttacgatcttgtacgcggttattcttatctaacactgccgtatgatcgcttaaatagaaaccttgccatttcatcatgccacgatcataataatcatacttcaaaaattgattaaccaaattgggatcatattcatcattattcataggcgttccctccagcatgcccaccgactaagccagcacgctcaattgcagtcgcaccttttactttgctagacaatttgaccaccgatgtaaaaccgtagcgcttgcgaatttcatcgaccgtgctatctaatttctgctttttcaaattaataaactgtgtgtcgaacatatctaattgttccgcactatcgtcaaccaaattgctgcacgcaatactaatatgccgaatcgattcgtgttgccattcttcacgaaaaagttggatggcatgttttgtgagttgctgattagcattagtcgcatcaatcttcattgaacgcccaaaaccaccacgcgatgcatcctcttttgcagcaaatgaaaagccaatccccagactgataaccgtggtcgccttgtgatgcgccctgagacgtgcagccacttgctctgcaatttcccgaatcacaacttcaatctcagcttggataaaataatcgcgtggtaatacctgactattcccataagacttctctttggccttatatttatgccgtacaacggcccgatcaatcccccaactaaacgcaaacaactgcgcgcccatgacacccatttcttgttttaaccgatagggatttgtatgcgcaatatcgtacatcgaatgaatgtgtttctgattcagtttctctgccgtacgatgcccaattgaccagacatcatctaactgggtcactggccacagtttatctgggacatcttcataatgccattctgcaatcaaactgtgattccgtttggcctcaagatccaatgcgagcttggcaagtagcggattatcgccaatccccaccgttaaataaatgcccgtttctttttttacagccagctgaattttacgtgcgacttcgtacggcgtcgctccaaagagttgccaactatccgtgacatcaagtaacgattcatcaatggaatacggttgaatatcttcttctgccgtaaattgctgaaaaatacggttaatcttctggttcacttggatatacaaattcatcttgggtggctcaatgattaaccgtttatcatgaattggaacatcccgggcacgtgttacgttactgataccaaataatttcttagccatgggactggctgccaatactaaaccactgcccgtgtttttctccgtggacatcaccaccaaaatagcctttaacggattcagtttcaaccgaacggcctctactgatgcgtaaaaagatttcgaatcaatcattaaaatcacgcggcgtggttcattctgatagtcatacacgactcttcaccccaacttgaatctgacgcacttgttcatctaattcgcgttgccaccgattaatctcaatcaaggtgacggctgatagatgacgataaataaattgcggaaacttatcgcggttgtagtaataattcattgagtcaatcaaatcatcactatgattcaccgctaatcgccgcaattctaaaactccaaagccatttaaatataaactcaatcctgtttgatctagcgtaatcacttctttattcgtatgcatcaggcacacctctttaattcatcttatgtcctcttaattatacgaacatacattcgatttagtcaagtgtgatttctcagagaacaaaaaacgctcaatcaaattaaatttgattgagcgttaaaggaaccttaaattttaataccaaccgttacttaaccagaaactcttagcggcatcccatgaaccgtaacgacttgttacgtattgatctgcgacgcggtcttgattgactgctgaatagtcaccatttaaatatgatgcggttaattgataacggccaatcatttgaccgttacgcgctgagtatgaaccaccagattctttttgcgcaatccattctttcgctgaactagttgtcggtgcaacagcagctgtttgttgaactggtgcagcttgcactgtaggttgtgcttgaacaactggtgctggtgtttgaacagcggctggttgtgcaacaactactggcgttgtcgtttgaacaggggttgctgtttggtcagtgtcgattgttaattgttccccgacaaaaatcatgttgatatcttgaatgttgtttgttgtggcaatttgattgactaaatctgtgttaccggcaaatttttgggcgattgttgataacgtatccccagttgcaacggtataagtagtagcggcacttgcttttgattgaccaacgaaaagtaatcctgctgttgcagccgttgtcaatgtagcgctaagcaataatgtcttaaaagatttcatgtaatagatgtgctccttgttgttttgatttattaacgtgggactaatataccatcttatattcgcttgtacatgtcaaaaccataacaattgatgacaaacaggtaacaaaatgacggcaattcccgcgctaattgtaatgcacaccgcttacttgactgctattacacaaataacgcctaggacaatcttctgtcctaggcgttataaactaatttattgatgttattcacgacgttttaaatgatacttagagaccgatttttggcggccaagaactagcggaatacgttccacaaacacatcactatagtccaatccaaaccatgaagccggtgtatcagtgaatttttctaaccataaacgcatttgaacaatccctttatccattgctcgaatttgagttgctggtgataaatcttcttgcatgatcacaaacgagaaatcgccaacgttccgatttggaattgttgtgtagcgttgtggttgtgctggtaattctccccgatgaatcatttcttgaatgatttgacgaataaagatgttcactttttgttccatcttaaagcctagatacaactgaacgttgacaatgtagtccgtcccaagcgtatctgcggtatattctgccgtgtacggttcatcagtaacattgaccgcaacaaaccagtaaacttgcgcccgttttggtcgtttatccaaaatagaataaagaatattcttcttaaccatattcttttcatatggtttattctgtggttttgaaagataaaccaaattagtcgtatacatagctaacgctgtatcgtctcgcaaatcatgtagttgttgtttataagctagtaatgaaaccgtacttgccttgaaagtattactttccttaatcgtattactacgataccaaacaaacatgatcgatagaataaacgccgcaattaagactgtcacgtaaccaccatgcatgaatttagcggcacttgagatgaagaaaataacttcaattgtcccgaagaagatgagtaccaaataagccaatacccatttcttctcgcggcgtcccaagtaatggaatagcaagatagttgtcattaacattgtaatcgtaatcgccaaaccgtaggcagcttccatgtgcgctgagttcttaaaatagaaaacaaccattaaacaaaccgcccatagaatccagttaacgattgaaatatagagttgcccttttaacttagccggataatcgaccttaattcgtggtaagaggcgcaacttgattgcttctgatactaaggtatatgaccctgaaattaaggcttgtgatgcaataatcgccgcaattgtagccagtaaaatcgctgggacctttaattgggctggcatcacttcaaagaatggattgaaatcagaaatatgttgatatgccgcaatatctttatgttgtaataaccaaacaccttgtccaaagtaattcaacactaaacaaagcgcaatgtatggccaactaccatagatattcaaccgcccaacgtgccccatatccgaataaagtgcttcagcccccgtagttgccaagaaaacactgcctaaaattagaatccccaccttattctcagggctaaacagtagttcaatcgcataatacggattgagtgccttgagcatcgttagatcccccattaagttaaccaaaccaatgccaccaataaaggtaaaccaagttaacataatgggaccaaaagatttaccgattagatcagtcccaaatttctgaatgaaaaataagaccgataagattgagaccgtcaataaaatcacctgatcttgattattaattaaaacgttcccattaattggcaaaccctttaacccttcaatcgccgtcgtgactgtcacagcaggtgttaacatcccatccgctaataacgtcgccccaccaataatcgcggggatcacgagccacttagcttgcttacgaatcaaagtgtacagtgcaaaaatcccaccttcaccattattatccgcccgcaatgcaatcatgacgtacttgatggtcgtcatcaacattaacgtccaaaagacaagcgaaatactgccgatgataaaatcgcggctgatgtttaccaaaccgccattcccctcaacaattgatttcataacatataatggcgacgttccaatatcaccgtaaacgacgcccatcgtaatcaaaatccctgcaactgataatttatgtccagttgtttgtttagttgtctttaatttcatgatttgttacttccttatactccaatatagcattatcgtagcttgttccagattgaaagtccagtcttatcatcaataattatcaatccactgtattccatgctataatagggacactgaaacaagcgagggatacaaatgaaagataaacgtcaatttgaaattgctaagaagcaatacaagaaactagcgaaccgaccactatcaaaggaacgtaagaaagctgttagtaccgcttcaacttacatgttcacaatcttagttgtggcctttattctattggttatttacttgttcgttcactaaaactgcttacgcagtttttttttacgtatttttttgcagaacatatattgaatattatttttcgtacgtatataattaaataaatagctttttaagcttaaattactacaaaaaacgcgaacattatcgagaaaggcggctctcatgccctcaaaaaaacaagtttatctcgctggcccattttttagccccgaacaaaacgatcggttagatcaagtggctgatttactcattaaaaacccaacgattgatgctgattcacttttcaaaccaggccaacacccttatcctgatgcagaattcggtactttcgaatggcaagtcgctacttttaatgtcgatacgcgtcaaattgaccaagcagacgtcgtagtcgctgttatggattttaaatctgaagaaggcgaattcgaacctgattccggtaccatgtgggaatgtggttatgcttttgcccacaataaaccagtgattctcgctcgtttccgtgataatttaccaattaacctgatgttggctggttctgcaacggccatcttcaatggtgaagcggatattgaaaacttagcgacttatgatttctttgaattacacaataaatatgttcaaacagatatcttttaactcaaaaaagaaccgactgatgcgtcggttctttttttttggcctaaaagccgttattctcgctcaattcacggtaccatcgaccgctcttcttcatcgtgcgctttgcctcatggtccaaatcaacacagtagaaaccataacgattccgataaccatttaaccaagaccaacaatcattgaaggtccaagtatgatatccaaaacaactgctgccggcttcaattgcacgatgtagttgcgtcagatgttcttgcataaattcaatccgatagtcatcttgaatttgcccatcttcacccataaagcgttcttcatcggcaacacccattccgttttcagaaacgtaccacggaatgttgtgataatcatttttcatcatcattgccacatcgtacaatgcttctggataaatctcccatccacgatatggattaatcttccgttctggccaaatataattagcatataagtcttccggtgtttgtgctgggaacttcggattctctggtgcttgaacccgcattggttgatagtagttcacgccgataaaatcgacacaatgatcggcaatcaattgccggtcgccttttttcgtcattggtaataactcatgttttgttaagaggttaattaattcttctggaataacgcccaaaacagttgggtctagaaaactcttagcgagtagtaagtcagcattttgtttagccattaaatcctctggtgcatcactcttagcgtaagctggcgtgatatttaaaataatgccgatctgaccatccggcttcacttttctaaattcagcaacagctgctgtatgcgccatcaaggtatggtagccaacctgaacagccttcttgaagtcaacaatgtctggataatgatagcccgttaagtaaccacattcgatatgcacgataggctcattaaaagtcgtccaacgatcaaccaagtcaccaaacaattcaaacgcagtttttgcgtagaatgcaaaggcatcaactgcttcgcgtgtctcccaaccgcccttttccattagccaccaaggcatatcgaaatggaacagattaatgatcggtgtaatgtctgcatcacgtaagcgcttaaaataatcccgataaaaatcaaccgctacttgattaacatgtttgccatcgggcattaatcgcgtccaagcaatcgatgtccgaaatgagttcaaaccaatcttttgcatattttcaacgtcttcacgatacaaccgataagtatcactagccgtgtcaggcccttgatcgctattaaacttatcaggttgcatctcaaaccatttgtcccaggttgatggggacttaccataacttagggagtatccttctgattgaggtgcggatgttgctgctccccacataaaatgctctggaaatttaatcataaacgctactctccttaaatgtaatcgccaacattttatattgtaccatttctctaaagtggtcgcacacctttctcagtcgattatttaatatgcgtacctccgaaatattatacacgttaaataaattgcagactgagattaataataatgtcaatcaaacttgtcgctgtcgatatggacggtaccctattaaatgaaaataacatccttagccctaaaacaatcaaagttgtcaaagctgctaaaaaacatgacgttaaagttgtgctatgtactgggcgaccactcaccggggtcacgccttttctaaaagaactgggtttaactgaagccactgactatgtgattacgttcaacggtgctttggttcaaaatacggcaactggtgaaattctagtgcgtcacactcttgcgcatgaccaatatcttgaacttgaaaccctctcccgccaaatcggttctcatttacacgctgaagacgatcaattcatctacaccgccaatcgcgatatcagtccttatacagtcggtgaaagtgccctcgtcaacatgcctgttcgtttccgccatgtcgatgaaatcgcacctaacaaggccttttcaaaagtgatgttaatcgacgaacccgccgtcttagctgaagccaaaaccaagattcctgctgattttttcgatcgttatcaatttgttcaaagtgaagcctacttcctcgaagtactcaacaagaacgccggtaaaggaaatggtttgcgtgatttagcaaatgccttaaatattgatcaatctgaagtgatggccattggtgatcaaggtaacgatttatcgatgctagaatacgccggcttcccagttgccatggataatgccattcctgaattgaaaaaaattgctaaggttgttactaagagtaaccatgaaggccaagatggcgtggcatacgccattgaaacatacgcctttgaaagccaagcctaatcataaggggagttattatgactacgttaattgatctcgtttacgcgtccccccttttctttttgattttatttattggtttacagcgatttgaaaaacgccgattaatcaacggcattgtgtttaactttttcctcttcagcgcattaatggatgctgcgctcattgtgattcgcctcaataacgaaacgctgaataacattgcaattgctgctgccattgttgtcgttctaatcgtcatgttcttctacttattcggtattgtcttgttgctgtggaacgcgtatattgtctggaaaaaagaaagtcacacgttatccaacatgctgaccctcctcattgcgttagccatcattggctcatttttcatcccaatcatcacgcgcttgttacacattcccgccgatattaaattatttgtcagcataattgtatcggtttttcttttgtatattccattgttcttctatttatatctaacctcactgattatctatcaattcaaccgcccccgttatcaacaagattacatcatcgtcttgggtagcggtttaatcgatggtcaattcgtcccaccgttactggccagtcggattaatcgcgccattcgattttatgataaacaagtcaaaaaaggccgccctgcaccaaaactggtcttttctggcggccaaggtccggatgagaagctgcctgaatcagttgccatgcaacgttacgccattgagcaagggattccgattaaagacaccctcaccgaggaaaaatcagtcaacactttacaaaacatgcaattttcaaaagacattatcatggctgataccactaaatcgaatcctaaaattatttttgcaaccaataattaccacacattccgcgctgggctttttgcaaagcaagcccgtttgaaagcagatggcattggcgctaaaacatcgcgttacttcttaccaaatgcaatcatccgtgaattcattgcaattctcaaaatgaaacagcatcaattcattttagtcgcaattgcaagtgtcgcatttgcagccttaactgttttactcaatcatatgtaacgtaaaaagccgttgtggacaatttgtccacaacggcttttttatgatgcctatttagcccgtgctgcacggacataatgaataatgagcgtcagtagaataacgccaaacacaattccagcaaacactaggttaggaatttcatagtcaatggctggaatcgacaagaataatttaatcgcgatgaagagaattaagatgtaagccatcggatttaattccggaattttcttcatcaattgggcgatgagttgggcaatcccccgcatgcagataatcccaatcattcccccaattaaaacaatcaccggattactagaaatcgctaaagacgctaatacggaatcaattgaaaaaacaatgtccatcaattcaatcgaagcaactgtgcgccagaaccgatgcggactactgattttagaacccgcctccggtgttttagcctgcttcggatgcccactctttctgaaataagcaatgactaagtaaattaaatacaatgaaccggcaactttaatttcccacaaatgaattaaataggtgccgacaccaataataatgaagcggaaaacataagcgccccataagccatacaccaatgacttttcttgctcaatttttgtaggtaatgtttgtgtctgtgccgctaatacaacagcattgtctactgagagtaagcattccataatcactaacgttaaaattaaaagccaatcttcggacgacgtaatgacagtttgccaattactcagttcaaagaatggttgatacaattgtacaatccaattcatctaaggttcctctatctctaatttctgttatttaattcctgtgactatcttaacgatttttcatgaaaataacaaatttattggttaattatgtaactagcacagcatttttattttataggctctggaaatacggtatactttttatagtaataattaataatattaatggaggtcgttttcatgattaaagaatttaaagaatttattatgcgtggtaatgtgctagatatggctgtcggggttattttgggggctgctttaaaaagcatcgtggactcattaacaaagaacttaatcaatccaatcatttcattattcgttggacaagttgatctatccggtattgcgcttaccattccaggcaccaaggccgtttttaaaatcgggaacttcctaaacgatgtgattaacttcttaatcatcgcatttgttgtcttcttaatcgtcaaaggattcaacaagcttcgtgacatgggcaagaagaccgaagaagaagaagcacaagtagtcgaaacgaaagaagaagtttacttaaaagaaattcgcgatttattagctaacaaagaaaaataaagtcacaaaaaaacgcctgaacaaattgttcaggcgtttttaattgttagcttattgaaatgtgcttccccaaagctaacccgttcaagttagcacgcttatcttttaaatctgttttcaaataatggactgactggtttgttttcatggattcgtttgatggcgtccccaataagtggcccgacagaaacttgtaccattttatcgattaatttttcttttggaagattaattgaatctgtaacaatcatttgcttaatcactgaatcttcgattcgttgaatagctgggccagacaataccggatgtgtacaacatgcgaatacttctgttgcaccagcatctttcaatgcttgcgcagctaacgtaattgtgccggcagtatcaatcatatcatcaatgatgattgcgcgtttaccgttaacattcccgataatattcatcacttcagaaacattcggtcttgggcgacgtttgtcgataattgcgattggtgtctttaagaaatcagctaatttacgagcacgtgtaaccccaccgtgatcgggtgaaacaacaacagcattttcagccaagtcattgctcaagaaataatcagccaataaaggagcacccatcaagtgatccactggaatatcgaagaacccttggatttgtacggcatgtaagtctaatgctaaaattcggttagcccctaccatcgttaacatattagccactaatttagcggtaatcggttcacgtgagcgagccttacgatcttgacgtgcgtaaccataataaggtaacacaacattgattgttttagcagatgcacgacgcaatgcatcaatcataatcatgatttccatcaagttatcattaactggtgcagatgttgattgaataatgaaaatttcgtcgccacgaatactttcttcaatattaatctggatttcaccatcactaaaacgtttaacagaagattttcctaaaggaaccccaacttcagccgcgattttctcagctaagggcttattagagttcaaagcaaagattttcaacttagggtcgaaatattgttcagacatgtcagcctccaaaaaatttatgttagtacctatttaaagtttaggcattttcaccccggaaatcaagattaaaacttaaaaagttcacaaatgttgtaaagtaagcgctgttcattagaaacgtgagagaaaaagaaaaagttaatagcgattaccatcgaacctcccgtttagtatcccattatatccccaaaaatgcttgtttattttggattatggattaaattgtcatttagcgcaagacaaggtacactcattgaaaaaggcggttactatgacccgccttaaatacactatttttaataatctctatcttttaattctggtaattattattacttccgatcgcttatttcacctcagcatgccctattttattcttggtcttattctattcgttgccgttttgatttatcagtatcattttttctaccccagtcacccgaactacaatcctaaaaattatcgcattacaaaaatgggctgggcaaccaccgctgttgggtgtcttatcatacttcttctaatcttattttcaagtggttcaatttggatttggcccgcttttctaatcgccttcttaatacgcgattatttctcaactttaaaataactacaaatatcaaaaaaatcgtccgtaatctcaaaaataagattacggacgatttttattttaagatgtgctttacaacactaagctaatcatcataaacacactttaatccaaaacgtgcttcttgtcaccgtaatttccgcttaatctaacatcgtattaatgctcaattactaaccgcgacagccagcactctattgccattcttcgtcatttgctactggtagttttgcccagtagttttctttgtttgtttgacgggcacgggcgatggccattgccttttctgggacatcatccgtgatggttgagccagctgcaatgaaggtgtgatctgcaatttcaaccggtgcgacaatgtttgagttgctaccgatgaagacatggctgccaacatttgcgtggtgtttagccacgccatcatagttaacaaagactacgccacagccgacattaatatcagtgcctaatgtggcatcgccaacataacttaaatggccaatcttcgtgcgatcgccaattttagcattcttcacttcacagaagttcccaacatggacgtcttcgccaatttcagcgtttgggcgtaaatgactgttaggcccaatgtttgaccccgtgtgcatgatagctgattcaatcgttgaacttgtgatttgaatgttgtcttcaattgttgaatcaataatagttgagccagcaccaacgaaacaatctgaaccaattgttgtgttcccttttaagacgacgttaggttcaacaattgtatcattaccaatctgaacgcccacttcgatataagtattttttggatcaattaatgtcacaccattacgcatgtgttctgtattgatgcgtttacgcatcacttttgttgctgcagcaagagcaactcgatcattaacacccattgattcttcaaagtttggcattctgtaagcagcgacaatttcgccttttttcttcaagatttcaaccacatccgttaagtagtattcaccttgtgcgttctcattcgtcacttcgtgcaaagcttggaataaggtcttgttgtcaaagcaataaacgcccgtattaatttcattaacagccgcttctttatcattagtatctttttgttcaacgattttttcgacaatcccgatatcattccggataatccggccgtaacctgttgggtctggggccgttgctgttaaaatcgttgcctttgcgcctttatcatggtggtatgcaaataatttttcaaaggtttcagcggttaaaagtggcgtatcgccactgaccacaatcgtaatgccatcttcatctttcagtaaagcttcagcttgtaaaaccgcatggccagtccctaattgttcagcttgtaatgcatattgtgaccggtcgccgagataatctttcaccttttcagcgccgtgcccaacaattgtgaccacattggttgggtgcgttctttcaacttgggttaaaacatgatctaccattggtcgaccacaaacctcatgtaatactttatataattttgacttcatgcgagtacctttacccgctgctaaaataattgcatttttattaaccatcataagctcctcgtcattcgtgattactggtctattttagcttaaatactaggctagagcaagctaatccgtattgaagtttagcgctttatcccgtatactggaggtactttattgcggaaggaagtcggccatgccaaaactgacaaacaacattcgattaatgctcggcagcatcattgttgccattgccttactagttggtgggtattggtctacctcagctcggcatcaaacacaccaagccgcagtcacgtcctctaccaaatcacaatcgcatgcgaggcaacaatcgataaaatcaaaaaaagcggctcacccgacaccaattgactggcgtgcgccttccgaaaacaaaccatatcctaatttagacgaacaacccgatttatgggtcgacgtttcaattgcacagcaacgtgtctaccttaaaaatggcaatgatcttttgtacacaatgcatgcttcgaccggttcccctgagtcacccacaccaactggtaccttctatatcgaagctgaacacggcgactcatttttcaatgcaaattccggggaaggtgccaaatattggcgctctttcctagatcatggtatttatctttttcacagtgtgcccacagatgaagctggcaatttcattccagaagaagcagagcaattaggcaaaaaagctaattcacacggctgtatccgtttatcagtagctgatgcccaatggttctataccgcaattccatataatacaaaagtcgtcattcactagcttgaatgacgactttttacttaataacgttcaaaaggagatgccctgatgactcagacaacccaaaaaacgattgccacggcttttaaacaattaatggttgaacaaccttttaataaaactagcgtcaccaccatcatgaataaaactggcattcgacgccaaaccttttatgactatttccctgataaatatgcgttattagattggatttacgatcaagaaatcggtgtctacatcgacgagcatctcagctatatccattggacacaggtgttggcgcaactatttaactacttcgatgctaaccgcgccttctatcaaaatgctttgtcgattgaagggcaaaacgccttcgaacgccattttattcatcacgtccaccaactgattaatcggattattcaagatcttgctagcgcccatcacattacgttatccaccgactaccaagcctttttacttagttttctttccaacgcattagttgcttacaccgctgaatggctccgcagtcgtcatccccaatcagtttcaaaagtaatcactgccctaaaaatgacattaactgatacaattaacggtttattattacggacaggacacttatatgaacaacggtaattataagataatcccatcaaaatttaatttcatatttattgaccattcttagcgtagttggcttccacgactgctttttctgcttgccaccagtcttcattatcacgataccagtcgatggtatgttgtaagcctgatttaaaatcagtgaattctggttgccagcctaattcttcccgtaacttcgttgaatcaatggcatagcgtaagtcatgacccggacggtctttaacttgatcataagcatctttgggttgccccattaattctaagattaattccaaaacatttttgttattttgttcgccatcggcaccgattaaataagtttcaccgattttacctttagttaagatggcccaaacagcgcttgagtggtcattcgtatgaatccaatcacgcacgttttgacctgaaccataaagcttaggacgaatgccacttaatacattagtaatttgacggggaataaatttttcgatgtgttggtatggaccgtagttgtttgaacagtttgaaatagtggcttgtagcccgaatgaacggacccaggcacgcactaataaatctgaactcgcttttgatgatgagtaagggctacttgggttataacgtgtttcaggtgtgaatttttcaccagcaccttcaccatgacctggtaagtcttcgcgcaatggtaaatcaccataaacttcatcagttgaaacgtggtggtaacgcacgttgtatttacgacaagcttcaatcaacgtatatgaaccgatgatgttcgtttgaatgaaaggtgatggatcttttaaagagttatcattatgactttctgcagcatagtgcacagccgcgtccgtcttttgaactaacttatcgactaattcagcgtcacagatgtcgccaaccactaattccacacggtctgctggtaaaccggctaagttagcgcgattgccagcgtaagttaatttatctaaaaccatcacgtgaacttctggatggttattcaccacataatgcacgaagttagaaccgataaagccggccccaccagtaacaataatatttttcaacctgaatcctcctaataatatgttaatcatagtattcattcttaatttatttaaatataacagcaatatctatttaatacatagcttaccgtattttaaaatcgcattaccgtcctcaacaatattttaaagttattactagttacattattaaaaatcatcttttcttttgaatattattctatataaaaaactgcttaaactcagtctccaaaacagacatcattttaagcagtttttacttcttatttaatcttcaacggtgctaattgggcttcaattgcagctaaatccgtccctgcttgcaacaatgccgctgccgtatagcaaccttcgattaaagcaacatcgtatagatgcaccgttttatccgttagttcttgggccaattcgaggttcatcttagcgctccctaagtcgtagaaggctaacaattcttgcccggcattggcttcaaaagcactttgaatcttcattgcgctagtcccaataccaccttcgtccgtgccaccagcagtcgttactgaaacatcagcggcaacttctttaattaaacgcgctacaccggccgcaatttctggtacgtgagaaacaatcacaacaccatattcactcatgataatacccccgccattaacattgtagtaaataaatacccactagaagccgcccctggatcaacatgtccgattgagcgttcaccgacataagatgcccgacctttggttgcttgcatatctttggtcgattcgacggcagcttcaattgcagccacatctaaagtaccatcttcaaccgctttgacaacgggagcccaaacgtcaatcaacgtcttttcaccaacttgtgcatgcccgcgtttttgaattccttctaaaccggctgccaataatgggccgacttcaagtgtcgtactgcttagttttgccatttctaaaaaggctgtcccatagagtggaccagaagccccaccaactttgctgatgagcatcatcgcagtcgttttcaaaataccttgtacatcggttggctgttgcttggtcaatgcttcatgcacagctaacaagccccgcgacatgttattaccgtgatcaccatcaccaatcggtgtatcaagttcacttagataatctttttcagcttgaatttttgcatcaaacaattcaagccatttcaatgtattttcaactgttaacatggtatctctcctttaccaaccaatcgttgtgactggttcatctaatttagcaacccaaccaggttcaattaatttcataattgttaatgacacaccggccatatctaaagaggtcatataattgccgacttttgtgaagtcgacttcaacattttcagcggccaagaggtccaagacatcattcataaagacgtattgttccatcagtggtgttgcacctaagccatttaccattaccgcaaaatgttcgccggccgtcatgtggtgggcttcttttaacttgccgactaattcagttgctaggtgtttcgaatcttgtaatttttcacggcgataacctggttcaccgtgaatccctacaccatattcaatctcatcaggcgctaattcaaaccccggttttccgacctcaggaacggttgcgccagataaggcgaccccgattgtcttaatattcggtgtaatttggtgcgctaattcttcaattgcttcgataccagcaccttgacgggcataagcacccagaatcttgtggacgaagattgtccccgcaacaccacggcgtccttgcgtatacgtactattttcaacagcaatgtcgtcatcaacaacgattgagcgaacgtcaatatcatccatagccgccatatccttcgccatttcaaaattcatcacatcgcctgaataattcttaatgactaagaacacaccacggcccgcgtcagctgctttaattgcttcataaatttgatcaggtgttggtgatgtaaagacttgtccgcacacagcggccgtcaacatgccatcgccgacaaaaccagcgtgcgttggttcatgaccactaccgcccccactgacaatcccgacttgtggccgatgttttaaatcggcgattttcatcactgcttctgttcctggaatttgtttgagttggtctggataactccgcactaaaccttggaccatctccgttacaatttggcttggatcattcattatttttttcatagtaacctcctcttaaatataacttcagtctatgttaccgctgtcatttatgcaacggacaaagcttggaaactgtccgaaagcacttcaaataaaaaaagcacccgcacaattaacctgtccgggtgctatcaaatcgtttaagctaagcgatctgcattctttgttaagtaattaccataactgacacttaacgttttattttcaatatcaactttatcaaccttcaagattgatgtgtaatcatcaaccatccgattgccttcgaaatctgattcagcaaagacagaaatgccaaccatttcagaatcaaactcttcaatcaagctcttcatcccattgacggtgccgccgcctttcatgaaatcatcgacaattaagactttggaattttcaggtaagctgcgctttgaaagttccatcttttcgatgcgagctgatgaaccagaaacatagttcacactgaccgttgaaccttcagtaatttttgaatcacggcgcacaattacaaatggcacatttaagtacatcgcaacgctctgtgcgattggaattccctttgttgcaacggtcataacagccgtcacttctttacccacatattggttggcgattaaacgcccaacttgccgtaatacttctggacgtccaagtaagtctgataaatagacgtaaccaccaggtaataagcgatcattttctgaaagccgttgtgccatctcagcgataaaagcttctgcttcatcttgtttaatcattggcatgtagcgcacaccaccagcagcgcccggaaccgtttctaagatccctgtgccacgattaaaaaaggtccgcttcacaattgataaatcttcactgattgatgacttagctgattcgtaacggtttgaaaagaatgtcaatggaatcaacgtatgtggtctttctaataaatagcgtgtcatatcgattaatcgatcgcttcttctaactttcatgttgaatacccctctatatattactttactgttatttccgaaaaaaactgtctaccaatcaattatatagaaatcttcggttaaatcctagtcttttttaaaaaaagagcttaattgttcgcttttatcccattaaagcgattcctacgccaattaaaaacgcctcaaccatttgattgtcggcgttttattatggtttcaatggtttaaccagatatacctcagcgcaaaatccggacatactattataaatccgttgagcccgtgaatactgactacagataccaaataccgttggaccactaccactcatctgagcaacatccgcaccaaactgcaataaccgctcacttaattgcttgataactggataacgttcagtcgtaatcggtgctaaaacattccccatattgcgagtcattgcatttaaatctccagcttcaacggctgcaaccagcgcctcagtttgtggatgctgttgaatctggtcgcaatccaatgcacgaataatccgcggcgtcgaaacactgacttccggtttcacgacaacgacccaaaaattcggtaatgacccgagtggtttgatctgatcgcctttgccagtgacaagggcggtttctccatatacgcaatatggcacatccgaatcaatttgtagccctaatcgcgccaattgttcgcgcgttaaaccaagttgccatagttcgtttaacccccgtaaaacagcggctgcatcagaacttccgccgcctaagccagccgcaactggaatatgcttatcaatttcaattaaagcaccggttggaatctgataggtgtgttgtaataattgagctgctttgtaggccaggttacgctgatcttctggcaaaaagccacttgatgtgcggacctcaattgcgggatcatcgcgtaatgttatctgaacatagtctgccaaatcaatcgacgtcatcaccatctgccactcaggttccccatcgtcatgtagaaagagtgcatctaaactgagattgattttagcaggtgctttttcaattcgttgcatcacattcaccttttacctagcatttaattgtttcattatactcatatctgcttgtaaaaaccaaccttttaacaatgcatccaaaaaagcactgacaatcatctgtcagtgctcttcagtcgacattattgattatcttttaccataatcttatgtctaaattcattcattaaatcaagcatctgcttggcattttccttaccaaacgtctccatccacgaggcaaaccgattatggatcttcggatttaattcttcaactgttttttgaccagacggcgttaaatttaaaatcaaccggcgccgatcatcgggatcaatttcttgtgtaatatagtctaatttaagtaaaacacgaatctgtcgagaaattgcaccgcgtgttacgcctcgttttttagcaatatcaattagactcactgaattatcatcagcaatctctttcataatcagatattgttcaaaagacaattggtaagcttgcgttggttcagaaaccaagtcttcgacatatttaatcgccgacatgtaaagttcaacgtattcatccaacaattgactatctttcacaatatttcccacctttttatttattttcttaactgtaccacaaatctttaagcttgactatttggtgtttgcgttaacttttgttttaactctccgccgaacaaaccggcgaagaacactgcacaaaagatcaccaagacgattaagactaaccaaagttgtgaaccattgccgttgacaacttgttcgaacccactaatcgtgtaagtccctggcaagaagattgccacaccacgatagaagcctgaaagcatgtcattcgggaagagtccccctgtaatgatgagttgtaagaacaataacccgaaggccattaaaattcccatcgttccaaaaagtttatccaatgctaaacatgcaagggtaaagaccgcactcgtcatcatacttaagacgaagaatgcgaacggttgtgcaatcgtcaatccaaaaaggtttgcaaagatatcaattaataaggcttgtgcgacaactacgccagctacaaccaacatccgttgcttaagtccactatgtgctaatgtttcaccatagcgataaagtgttaattgcgtcaacattgccccaacaaagaagacaagtgttaagactaatggcgagaaggtattaattaatgcgccatgatttgtatctgatagtaattgatctttgactggttgcacgaaatgttctacatttgcggaacctgttgaaagattggcaacttgcttgctaccatcgattaacttgacgtttaataagctaatcccagcacccgcttggcctaagccagtcgttaattgtccagcaccatctgccaataagcctgaaccctcgttaatttgtgtaatgccagaaacaagcgttggtgctttttggtttaattcttgtagaccatttgctaattgatggctaccattgttgagctgttggacgccactgccaagttgactttgtagtgtttgcaatccattattcaattgttggccaccatcattgagttgttgcacaccacttgccaaagctggtgtttgcccatttaatgtttgtagaccagcttttaattgttgaccaccattgttaagttgattgttattagcaactaattgattgctccccgtagctgcggttgaaacgccattcagataagttgtcaagcccggcatcaatccaggttgtcctaccttaccttttaatccttcctggatttgaactaatccatcatgaatcatgtcagcggcttgaatcccgcccattgtatcaactgtattgcctttttgtttcaagccagtatcgactttggctaaccccgctgtcagtgtatcaatcgcctgtgtggcaccatttagcgctaatggcgcttgatctttgcttgccatcttcgcaatgccagcttttaattgggccatattatcagcagtcttcgttaattcatcggatactgcttgtaattgaacacccgtatcactcatattattgcccatcgtgcctaagttggcttgaatggcttgcatgttctttcctgaagattctaattggctaccagcattgagtaagtcttttttagctgcaccgccaatcattattactctcaacgcgatagaagggttatcagccaagaatgttttaaatgtcggattgttttcggctagatcgtttaacttctgtaattgtgcaccagcatcttgtaagctgctcgcgacactatctgttttatcggtattgtatactttatcgttaatttgacttaaattagacccactatcttgtaaaagggcacccgtatttttcgtattatccgcaatcttcaataagtctgctttgataatttcggaattatcattattggaatggttaactttttgatctaactcttgaataccagcatttaaagcgcctaacccagccttcaattgtgttaattgttctttattaccatcaagactcgcttcgatttcatcagctgccgcggtcaacttttcgctcaactgcttggtgccatcagttaattggtcgacaccgccattgatttgttgcccaccagctaaaattgtttggttattggctgctaattggtttaaaccagcattaatttgaccagcgctagctgtataatctccaagcccagttgaaagttgcccagcaccagttgttaattgttggaccccactttgaagtggtgctgttttaccagctaattgttgtaagccacctgaaagttgtcctgaaccagtaacaagttgttggacaccagatcccgttttgtcagataattgttgtaagccatctgaaagctgacccgatccagttgttaattgttgcacgccacttgccaatggcgcactaccatctgccaattgttgtgtcccactatgcaacacatttaaattatcatagatttgttggctcccatttgataattgaccggctgctgtgtttaactttttaacgccattgctagcttcttgtacgccactgcctagcgtgccgattgcaccaagcaaggcttgattataagcttcttgaattttttgaacgacactgcccttcatttggttcacgacttgggttgtaatcatgccggccatgtagttatttttcttagacgtttcaacttttaacaagctgactttaggtgacttatctaacgcggttgtcgcatttttagaaaagtctttcggtaagacaacctgcatcgcgtatcggccgctagctaagttcgcttttgcatccttagcactgacaaattgccaatcaacctggtgatcattacgcaacgtttttagtacctgttgcccaactgccaccttttcccctttaaatgttgcggattgatcttgattcacaaccgcgactttcatatgtttaatattagtggtctgttcgtacttaataaaattaaatgtgattagtaatagtaaaatcggaattaagcagatcataataatgaacccacctaacttcactttgttctctttccaattgccaaacatattctttctccctttttgtatacgtcataatcattctatatgatattgttttatcaaacgaatgtcaacaactaatcaaccacgtgaagtatatggcgattcgtcaatctgctttttgaacaaaaaaagcactcaaccagttggttgagtgctactctattcttctattttaaactataggacaattggttcttcatcaaactcaatctcaatcgatttcgttaacaaatcagcatagctgtatgaaacacgttcaaaagcattttcatcctgatctaaatcgactacaaatactgctggaaaggtttctttaagaattccctttcgctttgtaacttttttgcgcccagcttgagcgacaaccattaacttgtctccgatatgcccatcgagaccgttcttaatattggcaagtgtggttggcattatgcttcacctcttcgagggatagtataccatataaacgaaaaatttgcaattataccattgtaccaacgatttggcaattacttacttagcttttttagcaaagattggctgattattcagcgcatcgcttaattgggcaaattgttggatactcaattgttcagcacgagcgctcggtgcaatctcgactgcttctaaggctgttgttaaagctgctttgacttcatcttgtttaccaaattgattttgcaagttattccataatgtctttcggcgttgtgcaaatgcgccacgaaccaattgatcaaataaggtttgattagcaactgttacaagcggtgctttgcgccccactaattcaacaatcgctgaatcaacattcggttgtggcataaaagctgtcttgggcacaataaaggctaagttcacttctgaatgaagttgaacggcaatacttaatgagccgtaagcctttgaaccaggttcagcgttgatccgttctgccacttccttttgcatcattaagaccatgcgatcaattggcaatcctgcttcaagtaagtgcaacatgattggcgtcgtaatgtaatagggtaagttcgcaacgattttgagattatgcttaccattaaattgttcggcgataatcgtttttaaatccgcttcaagaatatcttggtttaaaatcgtgacgttatggtagtgattcaaagtatcttttaagaccggcattaaccgttcatcaatttcaaaacttaatacttgatgcgcttttctggcaatttgttccgttaaagaaccgatcccggggccgatttcaatcacatcgtcatctttggtgatatcaccagcttcaacaatttgtttcaaaatggcgatgttggttaagaagttttggcctaagctctttttaaacttaaagccgtaacgtttgagaattttccgggtacgctcgggatttgcaatatcttccatattaatctcctaattcctgtttaatttgtaatagtgcagcgccaaattcagcttgcgtcacttggaacatcttgagacgcttgtaaagttgtttgctgttggtgtaaccaatgtgcaaaatttcgccgagtaattcgcgccgtcgctttgaatcagcccccgcaatcaagcccgccgttaataaatccgattgactgatttgttcgtctgcttcttcatcttgtgttaatagatgctcaagtgcttggacaatcgccgctggttttgcgtgttcaatgcctaaactgccgcctgctttttctggacgtgcttctgtccgtggtaaaaaggcgtgttcgacgcccggtacattttgagagatgattttacgaatcttctcgccatgaaaatcgggatcggtaaagacaatgaccccgcgtttttcttgagcgagcgcaattttttcgataatttcttcattgattgctgaaccgcgcgtttcgattgtcgaaacatctgggaaaacttcccgtaaccgcttcgtatcgtcgcgcccttcaacaacaatcacttcttgaattgtttttttcatagtgctcctaacttaaaaatccggtgggcattcgcatacgtcgctgccgcaatttcttctggtgccacatctctgagtttagcaatcgcttctaccacataccgtgtgtagcctggttgattctgcttaccacgataaggcgtcggcgttaaataaggtgcgtccgtttcaaccaacatcacgtccaatggacatgctttagctgcttcatggacttcatgcgcatttttaaaactgaccacaccgctgaacgaaatctgcatgccaagatccataaaccgtttcatccattcaacatcgccattaaaactgtggataatccccccacaatcacggacatctgtttcttttagaatcttgtacgtatcttctaacgcgtcccgcgtgtgcactgaaattggtatatgcaaggatttagcaatctcgatttgccgtgcaaaaacggtttgttgcacatcgcgtggcgaagtatcccaatgataatccaaaccaatttcacctagcgccactacttctggtcgttgtaattggtcagtcagcacggtttcttctgccttgtgataacctttggctgattcagggtgccaaccgataatggctgataaaggttcatattgcgctgctaagcgcaaagcgccctcatttaatactgtatctgaaccaacaatcgccatttcaacaacaccgagttcagcggcttgcgcgataaaatcagcttcttgccctgcatatggggtatcattcaaatgcgtatgtgaatcaaaaatttgcatttcaatctccttttagtgtcctcattctgacagttaaaacgtgctcttgccagtagctttctgcgctttgttacactttcaaaccggcgattccatcgccaattcgccaagttagacaaatgctcaaaagctaaccactggcaacacactcttttccattaaaaaggctaaaaggcctacagaatgtaaatgccttttagcccttttgacgtttctgttattttaaattaaccgatttgtgagccgttcaccaagttgtttggcacaactgctaattcaacttgtccgtcatgttctgctgataacaacatcccttggctcaattcgccacgcaatttacgtggtttcaagttcgtgacggctaagactttcttaccgactaacgcttcatagtctggatagaattcagcaatgccggaaacgatttggcgatcaccttgatccccagcatctagacggaatttcaatagtttatcagcgccttcaaccttggcaactgccttaatttcagcaacgcgaatttcggtttgatcgaaatcttcaaacttgatggcgtccttttcactgactaatgttgttgcttttggatcgaattcagctttggcttcagctgcttgttgcttagccttcactttttcgttcactaagcccgctttttgcgcttgacccatttgatccttaatatatgcgacttcttcatccaagtctaaacgtgggaagattggggtccctttagcaaccacttgaatattggctgggaatgtcccataaaccaattcacgttgcgcaacttgatcgaaatcaagccctaattgtgcaaacatatcgcgtggtgcatgcgtcatcacaggttgtaataagagcgcaacaatccgtaaactctcagccaagtgggctaagacactatcgagttccgctttgcggctgtcatcttttgccaagacccatggttctgtttcatcgatgtacttattcgcccggctgattaattgccaaacggtatctaaggcatcagagaacttcaattgatccattaagctggtatattgttcgattgtttctgtagctgtcttttgtaagtctgcatcaaatggtgtcacgtcagcttgatacgctggcactgccccattatcatacttgttaatcattgcaacggtccggttcaataagttgcctaaatcgttggcaagatcgtagttaatccggctgacaaagtcttccggtgtaaatgtcccatcattaccaaatggaatcgcgcgcattaaatagtaacgtaaagcatctagaccataacgttccactaacatttcaggataaactacgttgccttttgatttagacattttaccgtctttcatcaacaaccaaccatgaccaaaaatttgttttggtaatggcaagtctagagccatcaagaagattggccaataaatcgtatggaatcgtacgatttctttcccaactagatgcacatcagcaggccagtatttattaaacaattcgtcgttgtctaaaccgtacccaagcgctgtgatatagtttgataacgcatctaaccacacgtaaaccacgtgcttcggattacttgaaacgtgaattccccagtcaaatgagattcgagaaaccgataagtcttccaaaccaggtttgatgaagttattgatcatttcattacgccgtgacgccggttcgatgaaatctgggtgttcttcataataagccaataagcgatcagcatacttgctcatcttaaacttgtaagtttcttcagcgacccgttgaacttcatgaccagatggggctttcccaccgatcacattgccatcgtcgtctttataaacttctgctaattgtgattcagtgaagtattcttcatcagaaacagaataccaaccttcgtatttaccaagatagatatcgccttgcgctaataacttgtcgaagattttttgaaccgctttgacatggtattcatccgttgtccgaataaatttgtcatttgaaatttcaagagtttgccataatgccttgatgtctttagccatgccatcaacatattcttgtggggctaaatgcttttcagctgctttttgttcgagtttcaagccgtgttcgtccgtccccgtcaagaagaagacatcaaagcccatcaagcgtttataacgcgcgatgacatcggcggcgattgttgtatatgagttaccaatcgttaatttaccagatggataatagattggggtcgttacgtaaaatgttggttttgtctctgccattaggttcgctccttaattaaaaaaacgagaatcttaacaattctcgacttgcttaaataatgccatataagtaatcaaagtatagcacaaaagagcagtcatttaaacgacaactcacactaagccttcattaaaataaatcaatctgttcaggcgctttcggggctaaatcaggaaattctagcccaagtaattgttgtaattgcaaagcattatccgcagcatccccaccagaattattgttaaaaatcacggcaacttgttccgcttgatttttaatctgccgcacagcatccgcaaaaaattgtaattcatcttgatcatagcgatacaatgttcgttgcttccgccattgggcacccggattctgccacccggccatattacgaccatgcaggcgcaacatcgcaaacgccggattggtgacaaccggttcaaacggcacactgttcgtcggtgtttgtgcttcgtctgtgatgacgtgtgtcatgtttagctgcttcaaaaaggcgtacatctgttgcttaaaagcgtcatcgtaccaggattgatgccggaattcgacagcaattggcacatccggtaaccacgcgcgaatttgtcgtaaatattgactattttcctgattcagttgaaaaaatggcggaaactgaaataagaccgcctgtaattggccggccttaattagcggttcaattgattggcgataccgcacaaacaattctttttcagtactcgtaaactcggcgtagtcttcttggcgggtcattgcttggtgtgctttaacaatgaactgaaaactggctggtacttgcgtcaaccagtttgcgctgacggttggtgcgcgtaagccgtaataaaaactatcgacctccaccactggcagaaattgcgcgtagtcgtttaatgttaactgctttttgctgggcattaatgactgatgttctgaccaagtagttaatccaattgttatcatatccacacctctagaaccgttggaattgttgaatgaacaaagcttcttgttccgttaaatccttcaatgtgacaattaattgttgtcccatgcgtttataatttaaccgaatccgcgataggctaaagtcgatgactagcagcagcaacattaagctaatggcgcgcccctcagaaaacgccacccctaaaagctgtaccttgcccgttgcagttaagaatttaaaaataatgtataacgagaacagttcttcgacgactctaaaaaaacgaatcccttgcaacttcttctttaaaaccatcaagaccatcatcgtttggtcctttgtcatcatagtgcttcctctccttctcttggttcagtaatgggaattgcttcaaaaaaaatcatctgatctgcatgaaaatccgtgtcataccgattgagctgaccgcttaaaacagttggtaaaatggcctgtaagtctgccacaattccttgattatcagcagcttgtgcccattctggttcaaataattgaagcacgccttcgcgcattccgaccggataaagtggtagttgcaccgttggtaaaatatcgactaaaaaaatgtcaatcggtgcaatcgtttcaccgtcgatgtgccaatcaatccaccccgcattttggagtgtgtattggttggtttgtaaacccgtttcttcaaataactcccgttgcataccactgattggcgtctcatcgggttctgttttgccaccaatgccattccaaagcccagcaaatgggggcttaatccgattcaataatagtaaagtcccgcgatagcgaattaccgctaaattatagcgtcgtttagtcacagttcaatagcctcacatctcataaattagtttcattttagcatattaagcaaaagagtgctgactgtcgcggttagtaattgagcattaattcaaaaatagggattatggcgcccttcagccatgattgccatttttaggttaaccggaaaaggcagttcgaatcggcacgtttcaatcaaaaaagagcgctccgtctccgtttcgctctttccacattatttttcttctgcttctttcatcgccttcatcaattttacttgatattgtttcgaaattaaaattaacgtttggtataaatcccttacgtaatctgcgagtgctggatctttaaccgcagcaaggcgcgcatccatcaccgctttttcgcgttggatgtccgtcaagccgattttttgttcatgcttgattgttgcaatttgcttggtgacttgcatgcgttcttcaaataaaaccgccaattgggcatcaattgcatcaattttttgatagtgttcagttaacatgggctcactccttagttgctagtgcggcaaaaacgggtgtcgcatccgcttgtatcatagtgactggcatttcaaattgtaatgcctcttgattaatcgctactaattgggcatctggacggcgatattcaattaaacttgcaaatgggtacacacgaaatgacgtcccgaccacgacaattaaatccgccgcttcaatcgcctgaatcgaccgttcaatcaccgtcggatcaatcggttcttcatataaaacgatatttggtcgcaaaatcccaccacaatcttgatgatgcatatcctttaaataggcctgataaggcactgcttggccacacttttggcagctgacacggtataaactaccatgaaattcaatcacatcccgcgcgcctgcttttgtgtgcaacccatcaacattttgggtgataatctgccccttttgattcgcaatcgtcgccatcacttggtgaatgacatttgggtttgcttcaggaaaatacatctgctgcgtgacaaattcataaaaactggctggattggtgattaaattcgtgtgacttaataaatattctggattggcttgctgatgatacaaccccgttttcgatcgataatctggaatgccagaagccgttgacacgcccgcacccgtcaagaaaacaacatgctgtgccgcatgcaacattgatttaaaagtcatcaccatcactcctttttaacgtgcttttaattcgcagctttctgcgctttgctacatcagtcggccaatcgcctttggcgcttatccgtctgattaggcaagtgctcaaaagctaaccgcgaattaacgcactctgttctttaacgtgcttttcaagctaactttctgtgcttagcactgtgaatcaaatcatcgactgcgtcgctaattcgcttccctgtgctaatgctcaaaagttgaccagcttgaacgcactcattttcttaatgaatacggcattccaatttcatctaagaaggtttgcactgataaatcatacaatcgtttgaaatattccggtgttgccttgtcttctggaatccctaagacaaaagcattttgttgatcactcttaccaattccaacatacgctttttggttcgttgcggtcgcaaatagattttcggaatgtaaaatatcgtagacttggcgcacttctaatcgtagttgccgttcacttaataccggcgtcaatgtcaagagttgttggaggttcgtttcagcaaatcctagggttgataacacgcgatcaaacgcaacccacaagttaatcacagcccgccgtaatgtgaatggtgaatcaattgttttgcgtgccaacacatgatagagaatttcggcttgggcaaacgcaatcggataatcagccgtccactgttttaacagttgttggttgccaccatcaaagaagacgagggcatctaacagcgttaatacgcggaaaatcacccatctattttcgggatcgtctttttccggggtcagattatctcgtagaccttcaaggtaggcttgtttagtttcaacatccacaaagccatgggattcttgttctttttgaatcaccatgtgcacagcggcattgtacaaagttgtgccggtcgcaaccaattgttcatcgagttgcgcatcctgcgtggtgacatcggtcatgatttgtggaaaaccgattgataataatagtaagtgcaataattcgtgtgataaagcataatcggccgctgtcgcatcggtaattaagattgccaagctgccatcgttatttaaaacgcgttgtgcctgatcatgttttaacatcccagacgctgcatctgcgacccggatcttaatgggttgaggataattcttttgaacctggtcaattaaactttggatttctggggaaaattcagtagttgtcatttttggtctcctttgagtaaacagctttgcttttcatgataagccaaatccagttaaattaccaacggtttagaatgtatgaaagcggttaaaactgttataataaaggtaatcttaatttaaaggacgtgttgactatgacagaaccaaattcgcgaaaagtaattttataccttgctcagagtctagatggcttcatcgctgaaaaagatggtagtactgcttggttagctgcactcgattcatccgaatcagacgctgcaattcaagctttccaacgcaccgtcgataccgttgtgatggggcgtaagacatatgaacaaagtcttaaattagccggcacctatccttaccaagataaaaacggctatgtcttctcgaaaacgttacatgatacagaagatcgaacacatgtcgttgctgggaatattcctgagttcatgcgtcaattaaaaaaagaagatggcggcaatatctggcttgtgggtggtgcagaaatctttaccgaattgcttaaagcccagttagtcgatgaactcatcatcaccattgcgccagttctcctgggtgacggcatttcactggtcagcacgcacttaaccgatatgccattggaacttatcaatagccgtcaaatcggtcattttgttgaattgacatacaagattaattattaaaaatcaaacgaaaaggcagccacaatattttgtcgctgccttttcagattaaagtacgggggaatgaccaatgaaagccaaccttaaaatcccacttattttattcatcgctttatgtatcagcggcctctgccagctgttgcaccaagatttcttcgctgtgcttgtgatgctcatcgcaacaatcagttgtctgataattgcctttaaaaaccggcaagctagcggacgttaattcgcaacgcgctcataatcacgagcgtctgttctgtgctgatggtcgccccacgtaataattcgagcgtgaaagtcgctttttcgaattgattctgactgatatcgagattcttcaaattcgtgccagtcatatccatgccgttcaaacgattcccgatcattgttagccactgccaatcaacttgcccgagtgagacttcttgcatactgcaatctttaaagtcgacatgccgcatccgcgcaaagttaaagccggtgtaatccgcttggcaagtgtcgaacgtgacatcattcagaccagcctctgcaaaatcggaaccaatcaactggcaaccattaaacgcgactcgttggaagggatcattcgtcaacgaacagtttaacaacgcgcagtgttcgaattgcacatcttgaaaatcacagttattaaagtcgacttgttcaaactgacaatttttaaataaacagcctttaaagaataacatctcaacttcggtttgcttcaacgttagttcttcgaaaaacaaaccttcataagtctcatctggttcaaacgcagtaagctgtaccgtctcaagttgtggatttagccgcggtgcctgtgctttcttatctgtcatctaactgtctcctgtctattgtgattagtataccgaaaattgtcgccagtgacgacctgaaattcaggaaagccttttcttttcattaatggtactttgtggtaggttaaaagcatcaaataaaaggagtgattgatagtgcaaaaaatcaatgttggtggcagcggcttaatggcttcgccaattgtctggggtgtcatgcgcatcccacaactgagcgaccaagaagccctgacaatgctcgaaaccgcctatgaacatggaattaattactttgataacgctgatatttacggcgatggtgcttccgaaattaaattcgggaacgcccttaaggccagtcatattgaccgtgatcaagtgctcgttcaaaccaaagtcggcattggcaaaaaaatgtacgacttttcaaaggaacacatcatcgaaggtgttgaagccagcctcaaccgattacaacttgatcatgttgacaccttactgctccaccgacctgatccactcatggaaccggatgaaatcgctgaagccttcttaaaattgcaaaatagtggtaaagtccgccaattcggggtcagcaacttcaatcccggtcaagtcgacttactccaacaagcagtgccgcaagcattgattgctaatcaactccaattcagtttgatgcacactggtatgattgatgccggcgtgcataccaatatgcaagacgcgcgcagcattcatcacgatggtggtttattagaatactcacgcctcacgaatatgaccattcaagcatggagtccttatcaatacggcatgtttgaaggggtcttcatcgataatccgaaatttccagaattaaacgcagcactccaatcagttgccaaggcacatgacaccaacgtcaacgcaattgctagcgcatggctcctcagaattccagccagcatgcaagtcgttgtcggcacaatgaaccccggccgcctagcacaaatctgcgaagcagacaaagtcaccctcaccagaagagaatggtacgacctatacttggcagcaggcaatgacctgccataaagtgctgagatagccgtttatcacttgaagattagcctatcaccaggaattatggtggtttccggccatgatttttgttgtgtagtgaaccggaaggttatggctatcgaagcatgtttaaagtacgtttaaaacggttagtttctaagtaagtagtaattgtgcattaagcaaaaaaagcgccgtctcaattaatcttgagacggcgctttttttggttctacttaattctgataaggattgcctgcatactgatccaccaccgccatcgatccatcgtaatggccgcgaccggttgcatagtcaaattgcatcttaggttgtacattccaaacatacgcattaaagttcaacttcttatctgttgagattgcttgaacccagtaaccgcggggcatcaattcatctccacggaacacagttgtcacttggtaaatcacctttttattttgcgttagtgcttggcgaacctggtcttcaaaaatctgcatggtacgttgattgctgaagaccgtttgtgtcgctaagttcttcggattattgctactgccgagttcccctttttggaaaacaccatctcggttgaaattaaacgaaatcgcgtatgcaatcaaatggccgcgactttcaggaaagacccgttggccatcaatcatcacgggttgattatgccagccggttggttgccacgtttgacgatggcgtgtgtttgaacggcctaacgtctctttcgataagaaagccgtattagtcgttgtccgatttaaaccatccaacgcaccatacttgatccgttcggtttgccattgacggacatccaacgttgatttattatggttcacttctaaataggcattgtcgcctgacttaaaggtcttctcagccaagattgccgttgtttttttaacttgttttttatttgcaattgttggtgcattctcgtgcgttggttgactagattgtgtcgcctgacagccacccaacgccaacatggtcaacgataagccgaccaataaatactttttaaacatcctgttcctccctattcttacctgcttcacgacgcttcagttggtgcattgtcttgaaataggaactcaatagcaccaaacatgaaccaatccaagcgagtgggttggctaaacttgcgcccatgaagccgaattgctgcacgaggaagatcccggcaaaaatccgcatgaacaactccgcaatccccgctaaggttggaataaagctctgccccaaaccttgcaaggtgtagcgaatggcaaataagattgccaaaataaagtaacaactactgttaaagcggaagtagatttgtgctaaatccgtcacgtgcggttgattgttcccgataaacaggttaaccagtggtcgtccaaaggcaatgatcaacgcgcccatcactaaactaaagatgattgacaccattagtgtctggcggacccctttactgattcgtccaaattcacgtgcaccgtaattttgtgcggaatatgtcgccaaggtaatcccaaatgaattcccaacttgagttgctaattgatcaatcttcccagccgctgtgtaagcagcaaccgcgctagcacccaatgtattcaacatgatttggatcacgattgagccaattgcaataattgacgattgaaagcccatcggtaatccaaccttgagatgatccatgacatctttgcgcgtcacgcgaaaatccttcggccgtaaaacgaggaccggaatgcggcgataaatatatagtaagcataacacagccgcaattatttgtgcagagaccgtcgcaaacccggccccttcaacgcccatatgaaagcctaaaataaaaataaaatctaacacaatattcacaatgaccccaattactaagaaaaagaggggggttcgactatccccaagtgcgcgaatgatattcgaaagtaagttaaacgccatcgaggcaaaaatcccaccaaagataatcataataaaccgttgagcatcaacaatgatgctggccggcgtcttcatcatgaccaaaatatgtcgagcaaataatagactaataactgtcaaaatgatggttatcaccaaactaatcagaatgctcgtcgcaaagctgcgcttaacgccgcgatagtcttgagcaccatagcgttgggctgtcaagatggacaacccagccgtggtccctgtacaaaaaccgataatcagcatgttcaatccacccgttgagccaactgctgctaacgcattaacaccaattgtccgcccaacgattaaggtatcgatgacactatagagttgctgaaaaatattcccaatcaataatgggccggtaaataagataattaatttcaacggattacctttagttaaatcatgcatatcaattctcctttgctccatgttgataacttctcaaattacacaccaaaaacagcgtttacatctgtcttaaattgaattaagtctctcatattcaactttaaagtaccatcaaaaagcatctattatcccactatattagtctataaaaaaacagttaaacaagtcattcagcgacttgtttaactgtttttttaatttgaataggattagttaaagtaattaatccccattgcatcccgcacttctttaagggtttgttctgcaacagcattggccttcttgctaccttcttctaacatcttataaacggcttctggattcttttcaaattcagcacgacgttcacgaatgggtgcgaacttcgcttgtaagacttcgttcaagtaacgtttgatcttcacatcacccaaaccaccagcttgatattgcgctttgagttcagccactttttcacgatcatcatcgaaggcatctaaataggtaaagactgtgttgccttcaatgtgaccaggatcggttactttgatatgcaatggatcagtgtacattgacatcactttcttttcaagcgtttgggcatcgtctgataggtaaatcgcattgcctaatgacttactcatcttggcgttcccatctaaaccaggtaggcgtccttcgccttttggtgggaagaccccttctggttcaactaaaatttcttgtccgtaaacgttgttaaacgtccgtacgatttcacgggtttgttccaacattggttcttgatcatcaccaacaggaaccgtcgttgctttgaacgccgtgatatcagcagcttggctgactggataaattaaaaagcccgctggaatactttgttcaaaattcttttgttggatttcagctttcactgtggggttccgttgtaaacgcgaaaccgtcacaaggttcaaataatgcatcgttaattcgctcaaagcaggaatttgtgattgcacgaagacggttgttttagcgggatcaatcccaactgataaataatccaaagccacttgaaaaagactgttccggattttttcaggatcacgcgcattatcggttaaagcttgttgatcggcaatcatgataaatgtttcgtattcgcctgaatcttgcatcgctacccggttgcgtaatgaaccaatgtaatgcccaatgtgtaatttaccggttggtcgatcgccggttaagataatttttttgttcataataataccctccaatttaatttatcaactcaaaaaaagcgccctaattgtgattaaacaattaggacgcttctacgtggtaccacctaaattgcacgaaaatcatccgtgccactcacgcgataagggtgctacccgaattagttactcactaattcccgattgaaggcccaattcacaaccaacttcttgacgacttctcagtcccgccgcttcctgttcaagaaaatatcagttgctacttatccttcactttgtctgttgaattactgtcatactaacggattttaaaatgaatgtcaatcggtcgcttttttaccccaagacgcttataatataacaactaacaattggaggctgctatgttacacgaagacacaaaacaacaagaacaagcgcgcgttgaccgcacagttatacaggtcgaccaacgcctcacagtgattaaccaacaattggccaacgcctacaatgaaaccaaagacatcgaacaacgttacggcgacaatacgaaagtcaacattaccgaagtcgatgaccgcatggaaaccaacgccgcggtccaacaacaaaagcaattggtcgccgccgctgtcgaaaacgaaaaattactgactagccaacaagaacgcctgaccgatctcgtcaactccccttacttcggtcggattgacatcaccgaagatggtgaaacggaatcactctacatcgggaccgccacttttatcgacgaccaagacaatttcttaatctacgactggcgcgcccctgtttcgagtatctactataatgggacactcggtccagtgacttatgagacgccaaatggccctgtcaaagttgacctcaaactcaaacgccaattcaagattcaaaacggtcaaatcgaacacgtctttgatacgaacgaaactgtcggcgatgaactcttacaagccgtcctcggtgaacaaagtgacgaatacatgcaaaacatcgttgccacgattcaaaaagaacaaaatgatatcattcgcgatacaaccgctgacttactgattgtccaaggagtcgccggtagtggtaaaacctcagctgtcttgcaacgcatcgcctttttactctatcacagccgcagtcagctcgaagccgaccaaatggtgctcttctcacccaaccgtttattcagccattatatttcagaagtcctgcctagtttaggcgagaaaaacatgcgccaagtgacgatggccgagttcttaagtcatcgcttctcaggcttacaggttgagaacctcttcgaccgcttcgaaaaagatcaagccagttttcctgaaatgacacaagccatgcgccggtataaagaaagcacagcgttcatgcacgcaattgaagcttacgttaaacaagcctcaacccaaccgttggcattcaacgatctatacttcgaagaccgcccattttttactaaagaccagatgaatcagatttatctcgcgctccccgcaaatatgttacccggcgacaaattcctcgccactaaaaacacgctcatcaaacggcttaaacgccaaatcaacctcgaagttcatctcgactgggtcgctgaaaaaatcgataccttaaccgatgatgcttaccggacgattgtcggtgaccgcgaattcgattctggcgatgatgaacaagctttcatcgctcgtgaaatcgttcaaagttatttcgccccactctatgaatcaatctacaatgattatttcctagatgaatccacagaatatcaacacttcttaagtggtgcttgccctgccgacatccctacgaaggtttgggacgccatgattcgccaagtcgcggataacaatgaacgccacatcgtcgggctcagtgacgccgccccaattctatacctgcgcgacttattaactgacagcggccaaaatcacggcattcagtacctcttcatcgatgaaatgcaggattacagcatcgctcagttcgtctacatccaccacgcctttcccaacgcgaaattaaccgtgctcggcgattacgcacaggatgtcttcacggcgacctaccaaaccggccacttcatcgatcaactgaccgctgcttttccccgcttaaaaatcaaccaaattagcttaaccaagagttaccgcgcgaccgccccaatcaccaacttcgccaaggcactcttgccaaaagaaacagccctccaagccttcagccgtgacgggcgcctaccgcgcgtcattgagacgccaaacgaccaagcgctcgctacactgacccaagaaatccgccatctccaggcagaacacgcgaccgttgcgatcctcaccaagaaccaacaagttgcccaccaactctacgctagtttaacacctgatgaacacgtcacactcatcggtgaaacaacccgtagtttacccaaaggcatcctaatccttccattatacttagccaaagggctcgagttcgacgctgtgattggctacgacatctctaagaagaccttcggcgcacaatcagacgtagatctcctctacacactcgtcacacgtgctatgcacgatttaacactgattggcgtggatcagctcagtccgttgatagtggcactgccgacggacatctatactaccttacaatcaactaagcaatccatttaagcaaaaaagcctgtcgaaattatcgacaggctttttgaattcgtattttatgcaccgtatggaaaatccaaaccagggactgcatttaaacttagatcagcaaattgttgtttttgtaattcgatatgcgctgcggccccgatcatggcgccgttatcgccgcataatcgaagtggtggcatgatgaggtctaaatccattccggatgccttaatggctgtcgccaaaccttcacgtaaaccttgattggcagccaccccaccggccacaacgagttggcgcacgtttaattgacgcgcggcgtgcatcgttttagtggtgagcacttcgaccacactcgcttggaaactagcggctaagtcttcgtggttcagcgtctcaccgatttgatcggcatggtgcactgtgttaatgaaggcactcttcaaaccactaaagctgaagtcaagattatcttccttgagcatcgcacgcgggaatttaaatgtatcttgacctaagtgggcaagccgatcgatttctttaccagctgggtattgaatcccgaggacgcgaccaattttatcgtaggcttcacctgctgcgtcatcccgtgtatcaccgataatttcgaattcgccggcggctggcatgtacaccaattcagtatggccacctgaaaccagtaaagctaacaatgggtattctaaaggcttaacaaaccgcgccgcataaatatgccccgccatatgattgactggaatcaatggtaagtggtgtgcgtaagcaatcgctttggcagctgtcacgccaattaataaggcgccgactaatccaggcccataagtgactgcgaccgccgttaaatcagcgtaagtaaccccggcctcttctaaagccgcttgtgtacaaactgtgatttgttcaacgtgatggcgactggccacttcgggtaccaccccaccaaaacgttgatgactcttaatttgggtagcaatgatgttgcttaaaataacatgaccgtcttcgatgacggccacactcgtttcatcacaactggattcaaatgctaaaattaattctcgtttttccgacatgactgactcctattgactcaatatccgacacatactgaatgcatcttctttttcctgaatgtaataattgggacgcgtccgcaccactgtaaaacccaatcgctgataaacggcttgagcgcttgtgttgctggcgcgtacttctagtgtaattttttgactgggataatcgtgggctaaactaaccatttcgtgcaccaaaaagtggccaataccacgtttttgataacttggccgcaccgcgatattcgtaatatgagcttcattggttgaaaaccatgcaccgacaaacgctacgacttcagtcccttggcataaaaccagatacaacgatgtcttgcgcttgctcaactcactagtgaaggtccaacgatcccacggcgtctgaccggcatagaccgaccgttcaatgtccaacaatgccgtaatatcattttgactcgcgcgtgctaagtaaaatgtcgtctcatcaatttcaacgcgccgagttgtgtaaggcatttctttcttgacccaaatctggggtttgaggtattccctaaacttgttccacatacgaatcagcgcctcgctcatcatgcgtttttgcccagttaacttctgcttccgtcttgcgtaaataaacgggtccgaagccatggatatccgcgacaggttcagccatcaagcctaattcacccaagacgctggcgtgcggtaaattatggttggcggacacgaaatgcgcgttactacctaatgcagcttgaatctgttcgttaaagtgtgcaacgtcattccccacaaaataaacaggttctgccaataattgtaattgtgccagtagtgcttctagtgaaacgtgttgatcggccacaacggtttgcaatgtcccattttgccactgataaatccccgcgaaaacattgtcgcggcgtgcatcaaacagcggtacaatcaaggcggtcgtatccatcacattggccgctagcaatgctaaactcgaaatcccgaccaatgacttattaagcgtccaagcaaaagacttagccgttgtcaccgcaatccgcaatcccgtgtatgaacccggaccttctgcaacgacaaagcgatcgatatcttcaatggtggtttttgtttgttttaatagttgatcaatcattggaagtaacgtctgactatgtgtttgacgaatattaacagtcatttcgcctaaaatttgatgatcttcaaggagtgccacactcaccgcttgattcgaggtatccattgccaatagcttcattatttcatccttcttctgcttataatccttgttattctagcataaaaagccggtttccacaaaaaaaggcgttatcttcaaatagataacacctactcatttataatactctatcttttaatctaataatcggttcgaaatgcatcacgatgtatagaataatcggatgaatcactaatgtggcagcttccccaatggcccgcgccgtaaagtggaacccaaatggtgtatgactaataatcgacacccaccatgaattcaaaccgaggttaacgattagcacaactgtcacaacggcggcaatcacgcgccaccatgtaatcttttgtcggtagaagtaacacccatagatgaaagcccctagaaacgctgaaagtgtgaagcctgggaaataaccacctgggaccccaatcatcaaactattgatgaggtcgccaataacggcggcaagtcccgcccaaactgggccaaaccaccaccccattaaggcggtgacgatgaatccaaaactaattctgaaaatcgttagtgaaattgcaaagcgtgcaaccaccaattgtaaagcaattaaaacagctagtaaaacaacgcgtctagtgtctagcttaacaccaaaaatctgaccattaaccataaaaagcatctcccttttggagctgccacaaataatactgcggcgaatgcggtactgaaatcgcaagcattgctgcttttcgtctggtgtccacattccgttccaccagcacttaacgcttcagtcctactccgaatttttagaaccccttaaatgtatcactaacgttatttaattacaagcaattgattttcatttttcagcaactcttgcagaaaatttgctatacttacagatgagtaattcggatttaaagaaaggtgttcattaaacatgaagaaaattttagtcctccatactggtggcacaatcgcaatgtctgcggacgaagatggcgcggttgcacccacagatcaaaatccaatggccggctttgaaaagctgttcgataatcaattaatcattgaaagtgaagagttcgccaatcttccttcaccacacatcacacccgctgtgatgttaaaccttaagaatcgaattcaacaagctgaagaagacgggattgatggtgttgttgtcacacacgggacggataccctcgaagagaccgcctatttcttagacttgacacttcccaacaatatccccgtcgtcgtgactggtgcgatgcgctcgtcgaatgaaatcggcgcagacggattacacaacttgattagtgccgtttggacagccgcttctgacgatgctcatgataaaggtgtgctagtcgtgatgaacgatgagattcacacagcacggtatgtcacgaagacgcacacgacgaacgtcgcaacctttagaacgccaacttttggtcccatcggtttggtcagcaaacacaatgcgaatttcttccaagaattaattcgttctgaaatttgcgacatcaaaacccttgtcgaacctgtttatcttttaaaagcatacgctggcatggatgggactttattcgacgccatcaaccaacccaacaccaaagggctcgttatcgaagcactcggggctggtaacttaccaccagcaaccttacccgctgttcaagcgctattagatcgcaacatccccatcgtacttgtttctcgctgtttcaacgggattgccgaagacgtctacgattaccaaggcggcggtgtaaagcttaaacaaatgggcgtcaccttctgccaaggcctcaatggaccaaaagcacgcctcaaactacaagtcggcctcagcgcaggcaaaacaggcgcagcattaaaagaatttgtcagcaacgcaacatcatagagtgcgtcatcaacggttagcttctgagcacttgcctaacttagcgaattgacgctgtaagcgccgatttgataagtgtagcaaagcgcaggaagctgttgatgaaaacacgttttcgatagagtgcgtttgaaacggttagcttctgagcattaactggatttgccgaattggcgatgaaatcgccgatttggtaaattgggttaagcgcagggagctgtttcaaaaagcacgtttcaataaatattcgaagataacaaaagaaagcccatcacaactttatctgtgaatggggctttctttcgtttaaacgtgcttcctcgaactgccttttccggttaactgaataattgggattatggctaagacccgccataatcccaattatcccgttaatcctcaaagccaacccgttcgactcagcgctctttccacgtaatttccgcttctgctgcacttaggtcatccacggcgactttatgccgtgttgtgattatatcatcaactgtgagttgttcgaccatgctttgggtcatttgaccgtattgaatttcgtggccgtagcggatgttgacacttgctacgcggtgtgtcgtcaagaagtcataatcgagcgcatccaacatccattcaaaataatggacgttattaacgtgttgattaccatcaatatcgaaataacgcacacgatattctttggtcgtcacttgttcgggatcaatcttcttaatccgtgggaatcgtttgctacctttaatctcacttgactcgaatggtgccatgatttccggcacaacttgcaccatactccgtgtttcatacgacatcatcacgaagatgctttggacgaagacgcattcgttgccggcttcatcatataaccagaaattccggtaacagaaatacttgttgtaactctcagcttcagtcacaattttaactttttcatccaccttcggcatccgcgtaatcttcatttgatactgcgtgaccacccaaccaagattgagcgcatgcattgtcgcttcaccgacgttgagcgcattaagttgatgctctgatgctaaaattaaaatgttcaccaaggatgcaagcgttaattcgcccttgatatccgtttcgaaatacggaatttgatagttttctgaatattgctttcctggcatggcgtgacctctattctgttaattcgtggtaggcattataaacgacttgctttttcaagccatttgccttagcgaccgtcttaatcgccacgttggggcttgctccttgttgaatctgggcttccacttgttcaggaagggatagcgattccgttgcaactgcactgaccgttgcatctggtgctggatttccagcaactatcatcacaaattcaccacgtaattctgtttcagtcgcccaagcaagcacttcttctaggtcgccacgaatgaattcttcgaacttcttcgtgagttcgcgccccaaggtgactttacgatcggcgccaaacgtactaagcaaagcttgcaacgtctttttcaaacgatgcggtgcttcatagaagataagtgcttcaggcttttgtgccaacgtcgttacggcttccgttaactccttgcctttacgaggcaaaaaaccgtagaacgtaaacggttgtggtgtgatgcccgaagcaatcaacgctgtaatcccggcattggctccaggtaatggcaccactgaaatgcccgcttcaatacaagctttaacgagctcatgaccgggatcactaatcgatggcatccccgcatcactaacttgtgcaatatcgtcaccggcttctaatttttcaatcagcgtttcaatccgttgttgcgtattgtgttcgtggaaactaatttgtttcgtttcaatctcaaagtggttcaataacttctgcgtatttcgtgtatcttcagcagcaatcagtgcgaccgatttcaatgtatcgattgcccggtaagtcatatcgcctaagttcccgatgggggttggtactaaaaataaagttcccgtttccgtcgttttaaaacttgattgtgtttgcatgttctatcctttcaagatgcatcaataatgacataaagacaggccaaaagtaagcatcccttttgccctgccttttttaatcgtttgttcgttcgccgtagatgacatcattacaaaatgcgcaaggctcgttattttcgcgtcgtgacccataaaaatacgggcagatatggaagccttcttcgtaaagattctgtaagttttgttttgatttcgaaagggcttgagccccttccttacccgtttgcggggtggctgatggttccaattcttgcaaatgttcccgcaagtgcttgttttcaatctttaattcagcgtttttctcaaggacttcggcaaggactgctttcatttcactgagcccctcaaacgtcaatttagcttgctgttcaatgtctgataactgttcatataagtctttactcaccgttgatatcctcccgatacgctggttatgcgttttactatgcaattaactttaacgttaaactctctaagacgttttggcaactaatattttgttcaaaaatgcgttgtgcttgtaaagcatattccgtctgagcgaccaactgcgtggtagtcaacgcggcgctggcctggtttaactggctttcgtacgcaccaaaacaaggtgtggcgcctaattcatagcggtaattcaataaatcttgataccataagcccaccaaagttaaaaaggtcttctgctgttggcgatcaactaataatggtaaaatttgcgtctgaatctgcacaaatgcttctaaatcacgttgttcaactttttgtgcccacgcggcaagcttcgcactgacttgtaatagccaatcatccgccaataaggtctgtgcttcagttaagtcacttgtcaaatacaccaataactgcgcttgttgtggcaaaataccagctgcttcaaactgttgttgcaccatttgtggtgccaatgctgccagatcaatcacttgaagccgtgataaaatcgtggggagcatttgatttttattactcgtacataaaatcgcgtaaacattttgcgccggttcttccaagaacttcaacaaactattagccgcgctggcggttaacgtttcagcagcttcaataatgaataagcgttgactggattccatcccgctcttagccacttcttgtttcaaatagcgaatatcggcaatcttaatactcttaccttccggcttaatttcaatgacatccggatgattatgcgtcaaaatccgctgacattccggacatgtccgacaaggttgcccatctggtgtcacttgttgacagaacagacgcagtgccaaccactgtgccaattgtgtcttccccaatccctgtgcaccagctaatagataaccatgcgccatctgtccacgcgcgataatctgggcaaactgggccacaagtttgggttgaagctgttcaattgttaaactggccatcgattagaagcggtggaactgttcaatcggcatcacaaagacggttgccccaccgacttgcacttcaatcggatatgacattgagctatccatcgtggcatccatattaacaggcggtgtcatgaattgttcgcgtgcctgacacgttttttcaataatcttaagcgcttcaggaacccgttcgtcttcaattccgacgataaacgttgtattcccagattttaagaagccaccagtcgttgacaacttggttgcccgaatgttggcatcgattaattcgctgcttaataagttgctatctttatcttgaacaattgctaaaagtaatttcatttcaatctccccttttctatgctgtgaataagtctggatatcgttgttcaatcacttgcagacatttggcaacaactatgtctaagtctgcggtcgcatcaatcgtttgaatccgctctggattatcttgcgcaagttgtaagtaggattgccgaactttttggtgaaaagccaacttctcttggtccaatcgatcatattgatcctgtcgattctgtttaatccgttgtaaaccgacttcagatggtacatcaaggtataacgttaaatcgggcgctaatccattagtggcaaataagttcatttgcgcaacggcttcctcaccgatgccacgacctgccccttgataagcgattgaactatccacaaatcgatcacaaatcacgattttgttatcagccaacgctggttcaatcttttcaacaatgtgttgtcgccgagcggcagcgtataacagtgcttcggtgcggtcatccattgccgtattttcaacatctaaaatgacattgcgaatcttttcggcaatcggattgccacctggttcgcgcgtaacaatgatgtcttggttgcacttggattcaagtagcggtacaacagccatcaacgcacttgtcttaccagcaccatccggcccttcaaacgtaattaattttcctaccacaaaacaaccttcttcatccatagagttacttccattttacttgattcaacaaaagacgtaaagggaagagtgcgtatccggcggttatgttcttgcgtttagcgtgcgacagcagacgtttgaaacaaaaaaagacaaagtcactcgaccttgtcttcacgctgcggctgtcatctgaatgcccgcgctatctaaatgtatttctagttgctgcttctttcgaaactgcttcacctgctactttacgttggcgggcttggcggaataagaattcaaactttgcttgttgaatcttactttccatctctaattggtcatcgagtccgcggacgttgtcttgcgtcttttgggccatctgccacttatctttgacttggtacactaaatccaataaggcttgatcacctaattgttttaatgtcggtttttttctaccaaacatcgcaaacccaccattcttaaatttcttgacgcccttcaaccgcttttaacaacgtcatttcatctgcgtattcaatatcgctaccgactgataaaccgtgcgccaaacgcgtcactttaatcccagctggtttaatcaaccgcgaaatatacattgccgttgcttccccttccggtgttgcattagtagcaatgataacttctttagccggtgttttttgcaatcgtttaatcaagttggcgatgttaatatcatcgggtcccttgccttcaatcggtgataacaccccatgcaagacatggtagagcccatgataatcattcatccgttccatcgacatgacatctttcggttgttcaaccactaagatcatgtcttgactccgcgttgtatcgcgacaaatttcgcacgggtcttcatccgtaatgttgccacagacactacaataatgcagatcacgacgtgccgaaattaagttcttggcgaaattcgtcacatcgtcttcattcatatcaatcgtgtaaaaagctaatcgggttgcggtcttgttcccaatcccaggtaacttcatgtagctttcgatcagcttcgcaattggttctggatattgcatcaatgcacttccttaatgtctcacttaaaatgggaggcctttagtaaatttacccatttgggcttgtgtttgtttatcgatttcagtcatcgcttcgttagttgccatgataatgaggtcttgtaacatatcaacatcatctggatcgatggcctctggtttaatggcaatgtctttcatcttcttgtcgccagtcattgtgaccacgactaaatcgttggctgctttgccgacaaattctgtattgttgagggcttcttgtgtttgccccatttctttttgcatcttttgcatttgtttcatcataccttgcatattacccattccgcgcatcttcattacttcctttcaaatttaaacgttaatcttttttaacaaccaccgcatcgccaaacaaagcttgtgcttgttcgacaacggccggtttttcttctggtttcggcgttgcttctgcttcgtcatcagttgttacctgttgacttggtactgcgtgattctgtaaatattcctggcgaatttctggccaaacatcgtggggcactaaaaccaccttgaaggggttgccagtcaaacgattcaagccgttttctaaaatgttcaaaagatcttgatcattgctagctcgctcgaataaaatcgcgtagttaaacgcgacgacaacgccactttgactcgccgcaaccggttcggaaaccttcatcacggcgcgcttggtaacgtccaacatattcaacagatccggccagacttctttgagattctccaaattggtccgcgtcgcatctgccaataccggataaatcgccttacggttgacctttttactaatcttcttagcaggtttggcctttggcttggcagctggtgcactcactggtcccgccgcttccaatttttgtaacgccgcttgtaattgtgcaacttgttgactcaacgctgcgacttgttcattatcagcagctggtgcggcaaccatcgtagtcgttacttgggctgtctggacttgcgtcaagcggaccgttgcgacttccagatagatttctggatggttcgtgaaacgcaattgctgttgcgtttcattcaggatatcaatcaccccgtacaaacggtcagccggcatcgctgcactgagcgctttgaagtgttcatccaatagatccatttcacttgcggcgactaattcgggtgcttgttgatacaacagtaagtcgcgcacatattcaattaagtcttccacaaaacgttgggcatctttaccttcagccaaaatctgttgcaacaattgcaacgcttgtttaggcgcattatcctgaattgtttggacataatccgccaacaacgcttcggttaagctgcctgtcacatccaacgcattatccaacgtgacgtgattgtcgctaaaggataacacttgatcgagaatacttaaagcatcccgcatcccaccttcagcagctttggcaatcactttcagagctgctggatcataggtcatttccttttgatctaaaatataagccattcgcttaaataaatcagcggccgtgatccgcttaaaattaaagcgttgcgtccgcgaaatgatggttgctggcaccttgtgaacttccgttgttgcgaggatgaataccacatttgttggtggttcttccaacgtcttcaacagtgcattgaacgcaccagtggataacatgtggacttcatcaatgatgtaaattttataatcagcttgggtcggcgcatatttggccttatcccgaatatcacgaatctcttcgaccccattattagacgccgcatcaatttcaatcacatcattgagggcgccagccgtaatggcccgacatgtctcacattcattacatggttcgccatctttttgataatgacagttaattgccttggcaaaaatcttggcagccgatgttttccctgttccacgtgggcctgtaaataaataagcatgacttgtttggtgcgtcataatggcatttttcaatgtttgggtcattgtttcttgcccaatcacgtcatcgaaacgctgcgggcgccaaacccggtataaagcttgatagctcatttaatgacctccacctttgcaatttaaagtccgattcatttaaaactacttgttccattttagcatattttaccgtcaattttgattgcgttgcatgaaaaaagacccaaccgacaaaattaattgtccgttgggtctggttaattttcacaaaacttaagacacatgataaaacaaacttagtgctgctttcttccgaacctgacacgattcgtaggctcatcattgtctcaaggcctttcggcaattcctattctacctgattcaagcattaattaccagccattttcttttttttacggcgattttcgcgaatctttctaaaaaaagtctgcaataaactcgcacattcagcttctcgcaccccgccaaccacttcagcttggtgattgaaccgtttgtcagttaataaattcatcaacgtgccggtcacaccagccttaggatcactcgcgccaaaataaactttgggaatccggctattgataatcgcgcctgcacacattgggcatggttctaacgtgacataaatcgcggtatcttccagacgccaactcttttcaaccatacaggcttcttgaatcgcgagaatttcagcatgtaacgtcgcatcttgcgcgtgttcgcgaatgttatgcccccgtccaataatttgtccgtctttaacaatcacggcgccaatcggtacctcgccaatgatgcgtgcttggttagcttcatcgatggcggcttgcatccattgatcgatctcttgttgtgtttcactcacgcgttagtcgcccctttattttacttctcaactattaaaacacagtcgcgctagtcgagcaattaaaaatggtgccgacggattgtcgataccatttttaattgctccataagccatcctcttccgtttaactgcaaaatgagcattatggcaaggactgccataatgctcatttcactgttaatgctcaaagcctgaccaactcgagtcgcactctatagtttttctttcacctttgttgcgtaagccattagtgtttggcgcaaatcatccatcatatctggtagattgtctgcgtgttctccgagcttatcttttaattgggttaacctgtctgccgcagtcaacaagttattcacatccgcatcggagagttgatcgaccaactctaacgccttttgattaccatgtaatttgtcttttacaaaacttttaactgctaatcgtttgcgatagcgcgatactttatcgattactgccttagaaccgacaaaagcggtcgttgcgccaactgctgcagtcacccctacgccgattaaaattttatatctggttttcatcgtatcaacctccttgtactttaatcatagtttagcacaattcgcctgaatttaccgctttcaaccccggtccttactttaatttaatactttggagaatgtaataccccttatccttatgaataatttgcacgttgccaaaaatgctcatcatcgttttcttcgctgatggggcaccttgtttcttttggatcacaacgttcaattcaccatctggtaataagtgatcataggcaccagtcaaaatattttgcaccacatcttttcccgctctgattggtgggttggtgaagatggcggcgtattgatccgttacgttttgatattcagctgattcgaatacagtaacgttggtaatctgattcaattcactgttcttacgtgccaaatccaatgcccgttcattcacatcgaccatgtcgattcggcgctctggtgcgagcttagcaatcgtcatcccgattggcccgtatccacaccccatatcaagcactggaccagctggcgcttcactcagatcgaccgctgctagcaatgcccgtgaaccgtaatcaacagtgcttttagagaataccccgttatccgttgtaaatttaaaattaaagccgtgtaattcaaacgtccattgccgctcagcgtgttcaacgtctggatttttagaatagtaatactctgtcatcttttttcctcatttgtcgttagttatctgaaaatttcccaatttgaactgacttcatcaaacgacctagcaagccaccaggatgcggttgatccgcaacccgttgattaacgaccattaaaacttgaaccatcgtgaaaattaatgaggtccgtttttgataagcgatatatttcgaacgccattccgtcgtatatttcttcttataggtccgtaatccctggaatccgtagaagtgatagccgtattcatagatcagatgagcgattcgttcttcaataaagctaaactcggaagtccctacatttgcaagaggcgccatgccgaggttgaagtacgtgtagccatccgttcgattttgttcaaagagattaataaagatctcatccattataccagatggcgcgtcttgtctgtgacgcattagatcaatacttgcgacttctttggttcctgttggcatttcgttagcgaaagcaattaattggtgatcggcattatagacaactgcaattggggctttttggaggtatgcttcatcgaaaaagcctaacgagaagcctttttcaacgcgactacccaaccaatcatcagaaaccgctttgagttctgccattaattcggcactaaatggtgggtttaaaatttcaaattgatagccttcacgttcaaacttattcattaaggcgcgttcagcccgccgtttcttaccagtcatcgtgaagtccgccaaacggacgtagccttcttcaccaaacttgataaagtcaaacccgatttcatgcagttgcatcgttaattcacttgaaatttcgtagaacgctaaatgacaatcaatcaaatcagcgtcgtgcatcatctgttcaattgccggtaaaattttagccggatttccgactggttcacccattacaattaagcgatccgcttttttacgataaagcaagaatacctgatcttctccttcttcctgatagaaataaactgatttatcccgtaagtatgccaaatgactgacctcattgccgccgtaagtgttaatcacgttagcaattcgtgcttcatcatatggcgctgctattgaacggccccctcgactgagataacggtagacgagatataaggtccctgcggcaaccaacatcccgataaaaccagccaaccagactctttcggatggaaataaaagcgctgttggtacgggtttgcgatgccgtaagtgtggcgaattggcaatcccaacaaagccgtataacaagaaggcgcccacgaaaagtacaccatccacaatccgatcattccatgaaaattcgatccgttcacggtataattcgcgtttcaataagaaactagctacgagcacaaaagttaaaaagacagcgagtttgattgagaaatcccgccatagtgtattggtaatcgcaatcaccaatagcaccatcaacggccagaaaactttttgaacgcggttggcaacgccgcgggctaaggccaacatgacaaacgctacaatgatgtttgtcacacgatctaagaagaagaacgtgtatgggtagagctgtccaatcactgtgttggtaatcgcaaagttcgggacagttgctactaataatagaatgatgcttgaaatataaaggaagaaaacaatgaagtgatgagcgattttttgcatcacctgccgaggtaagccctgtaaataatgatttaaccggctgcctgcatcgtgagtaaataaaccaacgccgactaaaaacggcacgatgtaataaaagactcggtaaaatgacaaccagacaacggcgtccgcattttgaacgccgactgcactcagaccaaagatcatgaacaaatcaaacgttcctaagccccctggtaccatcgaaataacaccaatgatgttggcaatcatgaaaagtggtaagacttgtaataagtcacccttaatctctaagaaataaccaatcgttaagaaaaagccgcccgcaaaaccccattctaagaaagaccctaatgttaggcgtaaaacgcgttgcatcgaaagatctttgaaaaaggccgcatttttaaagcgcgtactaatcatcagaccagggaaatacaacgaaccgcccactagccataaccagtagttggcatacatcccaccaataccaaagccaaagatcaaaacgacactaatcagacaccagattgacaggccggctaataagaacagcgcaatttttgaaatcgcaattaagatttctttttgtgacgcttttttaccatagaaattggcccgtaaactcgcacctaagaagcccccgaatccggcaatgttcgtaaacgtattgacgatccaaccagatttgactttataccagaatgaatagtcctccggcagcaactccgcaatcacgaaatcataattgagcattggcaagaccgccacaaacccaatcaccagcatcgctagcaaggtccacggactttgtgtcgttaaactcgctttcaattgttccccgttcaagtcccggaaaatccggccgacttctaggataacaaagaccatcaccgaaaggatgaagatgccttttaacaacgttaggtgtcgctgaattccttcatatatgtgtttgccccattttcgcatatcaaccgctccttaacttaattaatttaattataagctatcccaaggcaaaacacagtaaaatgacaattatgttagatggctgttagattatgattttcgcttattacttacccggagcacaatccgattcccgttcacccgacaatcaatatcctctgattgcctttttagttctcaacagcaatggctgtcgcttaagatatggaatccatatttagcatcgtgttattttgtgcaactcgccatttatgttttacaaaaaaatatgtaaaaaaagaaccccacattagtggggttcttttagaaataaaacgtgctttcattaactgctttctgcgctttgctacatcagtcaaatcaccggctgattaggcaaatgctcaaaaataacccgttaatgacgcactttattttgaaacgtgccattggcgctagatttctgcgcttaactacaaatcgggcatcatggcttagatcgccgcgatgcccgattttaggttagtgctcaaaatctaaacaagcgccaagggcgctctatttaaattatttcaagttaacgacagcgccaacttcttctaatttagctttcatttcttctgcttcgtctttagcaacgtcttctttaagagctgaaggagcgttatcaactaagcccttagcatctttcaagcctaagcctgtgatttcacgaacggctttgataactttaaccttttcttggccgatttctgataattcaacagtaaagctgtctttttcagctgctgcgtctgcgccagctgcacctgctgctgctactggagctgctgcagaaacaccgaattcttcttcgattgctttaactaagtcgtttaattctaagattgatgattcttttaattgatcaacaattgcatttacgtctaatgccatttttgtttcctccattttgtgggtaatattttttgataacacttttaactacacaattttaaattatgcagctggttcgtctttgctgtcggcaactgctttaacagcatatgcgacattgcggactggtgcttgtaatacagaaagtaacattgataataaaccgtcgcgacttggtaatgtagccaaggcattgatttcatcaagtgttgccactttaccttcgatcataccacctttgatttcaagtgcatcagcactcttagcaaagttagcgatgatcttagctggtgcaacaacatcttcgttagaaaatgcaactgctgtagggcctgtgaatgtatcatccaaaccttcgtaaccagctttgtctgctgcacgacgcaagtaagtgtttttaacaacttccatttgtacgccagcttcacgtaattgtttacgtaattcagttacttgttctactgttaagccacggtaatccataacgacgatagaaacagcactattgaatttttcaacaactgtgtcaacaatttgtgctttttttgcaatgattgtttcgctcaattgattcacctccattagatttgtaaaacttgtggtcaagagttccttataaaaataaaaaactccatgtccaccaagacatagagagggatttcaacgtatcttcctcggcaggatattaagcctattggcacctgagtcttcggtagcataaataaccaactacaaatatagcatggattccataaagcgtcaatcattatcggcacttaattttagttatcctagcattacgttttacttattttatttttctgaaaaaacggtttaaaattgagactatcaagaaaattaatcgtaagaggtgcagttttttgaataatattttagtcgttaacgcgggtagttcatcattgaaatggcaactattccaacaatctgatttaaccttactggcaagcgggctcatggaacgcatgaacacaccagaagctagcttcaccttcaagttccaaggtcaaaaagaacaagtcgccattgctaatctttcctatgaagatggtgttcttcgacttttgaaacaacttgaagacaatggcatcattcattcacccgcagacatcattgcagtcggccaccgggtcgttgccggtgctaccacgttcgaaaaaccaaccattattgatcgcaccaacttagatacattaaaacaactcgacaagtatgcacctttacacaatcccgtgcaagttgactgcattgaaaccttgatgcatattttaccaactaatgtccctcaagtggctgtctttgatagtcaattctatctcgatatgccagatgaaactagtttttatggcttaccttatgaatacagccaagactatcaaatccgcaagtatggcgaacacggcattagtcacagctatatcttacaagcaacagctgactttttgaaagaacccgttgccgatttaaaattaattacacttcatttgggtggcggttcttcaattacggccagccaaaatggtaagcctgtcgatacatcaatgggcttcacaccgttagaaggcgttccaatgggcactcgtgctggttcattagatgcggccatcgtcccattcttaatgaacgaattggataagagtgccgatgacgtcatcacgcttttgaacgccaaatcagggattctcggcgtttcaggcgtttccgctgacatgcgcgatattcaatcaacacgcgctaccaatccacgggctaaactcgcctacgacatgttcatcacttctgctgtgaagttcatcgcgagctaccacgttgaactcggtggtgcgaacgtcatcactttcacagccggcatcggtgaaaacgacgcccgtttacgtgctgatatctgtgccaagctggctgttttaggcgttcaaatcgatcttgaattgaacgaaaacggctcaggtgcccgtcaaatcagtacccccgattcaactatcaaagtcttgatgatcccaaccaacgaagaattagcgattgctaatcacgtcctagcaaccatctaaattaatcgcgaattatgagagagccattagcgtttttcacgctaatggctcttttttgataaaataaaccctttttatcaccaaatcacgaacgatatttacaaaataataaatatttttcacatttttcttaaaaacacgattgttttgttgtacaataatgccaaggttcttaaaatactaattcagaggtgcataatggataaaaatattgatattgcaacagaatcacgaacgaactggttcgaacgtcaattcaaaattaaggcaagtgggtcgaccattaaaaccgaaatcatcgccggaattaccacttttattgcgatgtcatacattttattcgtcaacccaactatattaggcgacgccggcctagataagggggccgtctttgtcgccaccgcattaactggagtggtcggctgtttagccatggccttcatcgccaactacccaatcgccgttgcacccggactcggcagcaatgctttcttcgcctattccgtcgttttaggcatgggaattccttggcaaacagcacttgccggtgttttcgtcgcttccctccttttcatgcttgtcacggtcttaaaagtccgcgaagtcgtgattaacgcgattcccgctaatttaaaagccgccatggccgtcgggattgggttattcatcgcctttaccggattaaaacaagggggcatcgtcgtcagtagtgctaaatcattcgtcaccattacgagttggtcagatccgcacgtttggttgaccgtcttcggtttaatcgtcaccgttgctctattagcccgcaaagtccctggcgctttattcatcggtttggcggccacagccaccatgggagtcgtgactggtctaatcgcaatgcctcacagcatcatcgcttcaattccaagcttagcacccactttcggtgtctcaatcatgaacatccacaacgtcttcaatgttcaaatggccgtcgtaattctcgtctttttcttcagcgtcttcttcgatacaactggaacggtaatcggacttgctcaacaagctggtttcatcaaggacaacaagatgcctaagtaagtcggcaaagcccttttcgccgattcaacctcaatgattgccggttccgttttcggttcaaccccaactgcttgttacatcgaatcatcaactgggattgctgctgggggtcggactggtttcaccgccgtggtcgtcgccatcatgttcgtcttaagcttattcttctcacctttactggccgttgtgacgtcgcaagtgactgccccaatcttaatcatcgtgggctcattcatgatgaagtcaattgccaacatcgactggtcagaattcgaaacttcttttgcagccttcatgattgttctgtgcgtcccattaacctataatatctcatacggtttagcattcgggctgatcacttaccccatcaccatgattgctgctggcaaaggtaaaaaagtgcatccgattatgtatgtcgctgcgctcttattcctattattactcttcacaatgcacgaattacctgctaaataaaggagattactcatggataaaccaactttaaaacaactaattgatcaagctgccggccgtcaagctgccgacatggtcattaaaaatgcaaaggtcgtcgatgtctataatggccgcattattgaaggcacactcgcaattggtaatggtcgcttcctcggtatcagcgacgactaccttgcaccaaaagttatcgatgcacgcggccaatatgttgtgccaggtttgattgatccgcatattcatatcgaatctgccaatgtctcacccgctgtcttcggatcacttgtaacaccacatggcacaacgacgatcttggccgacccacacgaaatcgtgaacgtcgctggcatgcggggcttgaatacatggtcgcatctgccaaaaagacagcacttgatatcaagtacaccatgccctcgtgtgtgcctgctgctaatccaaacctcgaaacatctggtgctgtaattaccgctgatgagattcaacaatcttatgaccaaggcctcacttacggccttgccgaattcatgaattatcccggtgttgtcaatgctgatgatggcgttttagacgaattactcgtttcactcaacgcaaataaactcatcgacggccactcacccgctttaaaagaacaaggcttaaacgcatacgccgctgctggtattcgtaacgatcacgaatgtacccaagtcgatgaaatgctcgatcgcatcagtcgcggtatgtatgtttatctccgctacggcaccgtctctaagaatatgccaacccttttgaaaggcgtgacgccgcaaaacgcacgtttctgttgtctctgcggtgacgacttacaatccgtaaccctccgtgaaactggccacttggatgaaagtatccgcgttgctatcgcaaacgggatcgaccccatcatggcaatccaaatggccaccatcaacactgcccaatgtaccggcttagctgaccgcggcgggattgcacctggtttgaaggccaatttcctattggttgatgctctcgaacaattcagtgtgaatcaaaccttcatcgatggtcaaaaagttgctgccagcggcgaatacctactaacaactgaagattcagttactggttttgatgacttgttacaaaccgtacacctcgatacattcaccgctcaccaattaaaactcaacctcacaagcgataaaacccacgtgatcggcttacaaagcatcagtcggacgcaaaatctcgtcttaccggtcgctcacactgcagacggtgatttccaatatcatcctgacgaagacatcgctaaagtggccgtagttgaacgacatcatctcactggtaatgtcggcgttggcctgcttaacggcaacggtgcgattgccaccagcatcggccacgatagtcacaacctcgtagtagtcggcaccaacgacactgacatagtcgttgccatcgaagcgctcaaagaaagccaaggcggtggcgttgctgttcaggatggccaaatcatcgcgacattaccatttgtcatcggcggcttaatgagtaacgaacccatcgacactttaattgaacatcaaaaggccttcaatgctatttgccacgataaactccacgtcaccgctcacttcgatccgactatgaagctcggcgcaatgccactcgacgtcatcccgaacttgcggattactgacaaaggtttagtggatgtcacaaaattcgaaattatcgacattaatgcttaattatagcaacaaaaaaagcgctcatcctttcggatgagcgctttttgcattaccaacttagaagctagcaacgtcaactttgacaccagggccaaatgttgagctaactgataaacttgtaatgtattgacctttagctgaagcaggacgagctttgataatcacgtcttgcatcgctttaaagttttctactaatttagcagcatcgaatgataccttaccgattggtgcgtgaacgataccagctttatcaacacggtatgccacttgaccagctttaatgtcgttaactgctttagtaacgtccattgtaactgtaccagtcttagggttaggcattaagcctttaggtcccaagacacggcctaaacgacctacttgagccatcattggtggtgtagcaacggcaacgtcaaagtctaaccagccgccttggatcttttcaactaaatcttctgcgccgacaacgtcagcaccagcagcttcagcttgttttgcttgttcgccttgagcgaaaacaatcacgcgttgtgtcttacctgtaccatttggtagtacgacagcaccacgaatttgttgatctgcttgtttaggatcaacgtttaaacgatatgcaacttcaagagatgcatcgaattttgcaaaatcaactttctttactaagtcgattgcttcttcaacagtgtatgctttagtagcatcaacttgttttgcagcttctaaataatttttaccttttttagccattagggttttcctccttgcaattgtggtgaacggtttttgacctcccacttgatttttcaactttcattgaaaatccgactgaaagtgtcaagcatgaattaaccttcgacagtgaatcccatgcttcttgcagtaccttcaaccatgcgcatagcagcttcaacgtctgcagcgtttaggtcttgcattttagtttcagcgatttcttgcacttgagctttagttacagttgcaaccttcttagtgtttggttcgccagaacctttttgaacaccggcagctttcttcaagagaactgctgctggtggtgtctttgttacaaagtcgaatgaacgatcttcataaacagtgatcacaactggaattaataaaccagcttggtcagctgtacgagcgttaaagtcctttgtaaagcccataatgttgataccagcttgacctaaagctggacctactggtggtgctggagttgctttacctgcaggaatttgaagtttaacgatgtttgctacttttttagccacgaaacatacctccttaagtccgtgatgtggttaagatggccattatatttggtctcccactagtgtatgaaaacataccttaataatataccaagcaattgccgaaaaagcaaggcgattccattaatcgcgccacaagaaatcatcaatggcttgatcaactaaacgattttcgtgcaacatgctatgtgctccacccggtccacgaactaacatctcctggtaatggcgcacgtgtccttttaataggctacgcaatgcaaaactactatcgactgctaccgaaccatcgtgtcgattagttcctagtaactcgccagcaatgtttaagacactgatcgcagttggaaaatacttggcccgcacggctaaataattataattacgtgttcgtttaactggtccacgactggttaactcgctccaaaaaacaagtggtgtatccggaccaattgatggatcattaactggcgctgccaacaatatcactttgtccaccacggcatggtctgatgtcaacaaataacgcaacaccgtaattgcgcccatcgaatgccctactaaattaacttgcgtaacgccatacgcttcttttaagtgttcaataatcgcagctaaccaacggacttgatcttgcacatcggcgcggttattagcaaataagacttgaatcgttgggttattagcctgcaacgccgcgtctccatccacatgcaatcgaccgtttctgcccacccaaatgaccatgctcttcttagcaattccggctttttgtaggcgcccgagtaagtgaccgaatgaatagcgattcccccgatagccatgaatgaatagcgttggttgttttgtatataaacgtgcgcgcggccgccaatgtgccgaaacccggattaatttgtaaaaatccagtcctgccagtaagactaacaaaaaaatgactaagcccactgcaattaatatttgatcaatgatataccacatcgtcatcacatcattctttcgaaatagacactattgattgttcaaaaaaagcggctgagacaaatcatctttcgtctcagccgcctatcttgttggggcttgggacaaatcctagccccctactttaattgttgaaacatgctttttgaaattgactcttgcacttaactacatttgtcaaatcggcgcttgcagcaccaattcgccaaattaggttaatgctcagagtcaatccgtttcaaacgcactcttttttcgaaacgtgctccttcagtcatcccgactgaagtcgcactctaaactagttcgtctacttggtcgtagtctaattctgttgctgtttcacgaccgaacatgtcgatattaacctttaatttcatcttttcgtcgtcaacttctgtaatttgaccgacaaggccagcaaaggccccttcgataatcttcacagattcgccgactttgaactcaacatccaaatgacgagtgctcatgccaagttgacgcaagatttgtgtgatttcatcatctaataatggggctggtttgctacctgcaccgtgtgaaccaacgaagcccgtcacacctggtgtattccgcacaacgaaccaagcttcgtctgacatcaccatttcaaccaaaacatagcctgggaaagtcttcttcatgtcgactttgtccttaccgtttttgatttcatgttcttcttcttcaggcaccacaacgcggaaaacattgttctccatccccattgattgggcacgcgattccaagtttgccttcactttattttcgtaacctgaatatgtgtgtaagacataccagcttttttcgattgattcaaccatgtgcgttctccttttaaataccaaaataaaaaaactccgaccacgcgaagttttttgcttgccattagtatagcaaatccgacttaattaagccagttctaaaagataaataattgtagtacttttaagattgcaaaatcaacaacgccaaagaaaatggcgaataaaacggaggtcatgacgactgttgatgtatctttacgtgtttgtttggcatctggccaactaacagttttcatttcctgaccaacactcttaaaaaacttaatcatcttatttcctcctaattagcgcgtttctttgtgttgtgagtattgcccacaatgtttacagaatttgtttaactctagacgttctgtccgattcttgttctcagcaacatagtagttacgtgagccacagacagtacaggctaaggcgactttcttaacacccatatgaaaagcccctctctaattgacgtttatcccatttactttatcatgtgttgaccaaactgtcaatgtggtggattatccccaccaggtcgtgcggacaatcgctaataacaagctgacaatcaagctaatattgatcgccatcgcattttgaatcgcggtaataaaggtgacatccttcagttgccgtgtattaaaccggcgattattgcgcaaaatgacaggaatcaataataacaatagtaacgattcaatcggtaagaccttcgtaatcactgccacaacaacggccactagtgagaaccaaatcaacgtattatacaaccgcaacgcccaggttgttcctaaataatgcggcagtgtataacgttcattgcgccgatcttgatctagatcacagatattatccgccaacataatgttcgaagtggggattgcaataatcacaccgattaggcatagactaagcaatgttggtaattgacctttaagggtaaacgttggccaatcaaaatggagcgccatgatgctgtcgcttggtacgttgacatagaccatgataaaaaatgcaccaaatgattctgtcacaccactcaacaattcaccaaccggcatccgcgatagcggaactggcccgaacgtgtaaaagacggccacaaaaatacaggcgccaccgattaatagtaataaaatgttcgtttgccaaaccaaccaaattccagccgccatgctgaacaataaaaaatagagcattaaatgcagtgccttggttggcgacaaatgtttgcgcccaatgatattcgtctgtgcccgataatccagatcaactgctttgtagtaatccatcacattattaaagccagtcacaaataatacaatcgaaaactgggcgacaaaataaacaattgtcgtcactggattcagctggccattaacgtaccaacaataaacaatccctaagattaagggcaagacactcgccgtcttgacctcaatccggacaaattctaaaaacgttttaaaagacatctcggacttccttccattaaaaaagctaggacaaattgacttgtcctagcttcatcgtaccttctagcagacagttacccattaattcattggcagctgactgccgaagtcccgttttattcaccgtaaacgatgttatcaactgtaatcgttgctgtatttcctttttgtgcagcattgactaattgttcagcatagttgacgaagctgtgtgatgattctgttgcaccagaaacaacatctactttgcctggttcttgtgctttgacgaattcagaattcaacttagcgatgtattccttaggatcagtcttagcaatcttcttcatttgtttgttgtatgcagcatcgtcagcttttgacttgccatctttattgatgttatcgaatttagattcagtgattttaccgtctttaaccaccattgtgaaaactgttcgatagtcatggctgtaattcttttcttctaacttatatgtgccatcttgcatcttagcaccattgtcgatttcgattgtttcagtgttgccagcttgagcagcttgcactaattgttgtgcgtaattcttaaatgaatttgagctatgagttgcgcctgatacgacttcgatgcttgaaacatctgcacctttatctgtaaattctttgttcaacttaggaatatattctttaggatttgtttttgaaactttcttcattttttcgttgtatgtcttgtcatcttgttttgacttgccatctttatcaacgtaatcgtaagttgtctttgtcactttgccgccggcaacggtcattgacatcttaacgcgataattattttcgtagttcttttcttctaagttgtaagtgccgtcttttaattcaccgccggcaacttgtttcttagcggttgcttttttgcttgatgattctttgactgaactagattttgcctcttttgaagatgaatctttagcgttattactattaccacaagctgctaataccattgctgacattgcaacaactgataaactagctaatgctttacttaatttcataattttcccgcccttttcataaataatcatatagtttgtatcaaccttcacacaaagtcagtttatcttttttatgtaaaaagttcaagtcttttaaatcacttattttacggcgattaactttggttttacacaatttaaaacggtttccttaatagtcatcaatcccattaatcttatccgtgaataaatagacaatctttagtttattctgtataatggatactgattgaaaacgcatttatttcatttaggggtggctcatcatggctcaaaaaaacatcgtcatcatcggtgccggttttgccgggatctatgcgactaaaaaacttgcgaaatattacaagaagaatccagattatcaaattacattaatcgacaaacattcctactttacgtatttaacggaattacacgaagtagctgctaaccgcgtgccagaagaccacgttcaacacgatttgcaacatctcttctgtcgccgcaaaaacgttaagttggtgaccgatacggtaacccgcatcgatcaagcaaacaaaaccgtcattactgaacatggacgctacgcctatgatcaagttatgttggggattgggagtgaacctaacgactttggcacacctggggttgccgaacatggtttcactttaggttcatgggaacaggctgttgaattgaagcaacatattatcgatgttgttcgtcgtggggcaattgaacacgacccagaaaaacgccgggcccttttgaatatcgtggttgttggttctggctttaccggaactgaaactatcggcgaattacgcgactggcgtgatgaactagcagctgataacaagattgatcccgaagaaatccaatttacaatgatggaaatggcaccaaccatcatgaacatgctcgaccgcaacgatgcagccaaagcagaacgctacatggctaaacaaaaaattgatgttcgcaagaataccggtgttacaggtgttcacgaaatgcatgttgatttaaatgatggttcaactttcccaactgccactctaatctggacagctggtgtcaaagcttcctcacaagcggcacaatttggcctaacaaccggtaaagccggccgaatcgtgacaaacgaattcatgcaatctgttgacgatgacaagatttacgttgtcggcgatgtggctttcttcgatgaaactgatgacggccgcggtcaaccccaaattgttcaaggcgccgaagcatctgctgcaacagccctaaagaacatcatcgcaactgaagaaggtaaagcaacagtcccatacaaagggagctattccggcttcatggtttcaattggttctcgctatgcggttgccaacttgatgaatttcttccatctcagtgggttctttgccacattagttaaacatttagtcaacatgctctattttgttcagatttattctggctacgatttattccactattcaatgaatgagttcttcagaacgaagaacgatcgcaacttgatgcgcggtcatatttcacggtatggtaatgttttatggacagttcctgcgcgaattttcttaggcgcaatgtggcttgttgattgttgggacaaggttcaaggtgaaggttcttggttcaccaataagctccggttaccttttgactggcttcaaccagctgtcaccagcggtgcttctaaagcggcggatgcaacaagtgctgctagcggtgccgctgcaggcggggctgctgaaccagcaactgctaaagtcacattcggcctttcttacttattcggtcatgatccaatgcccgtcttcgataagatgccccactggttctacagcatcacgaaggtcttgattccaaaccaagaagtcgccttcttcatgcaaaaaacaatgaccatcattgaaattttaattggcttagctttaattgctggtctcttcacttggttaacgagcgcagtaaccgttgcaatggttatcacattctgcctttcagggatgttctattgggttaacatttggattattccaatggccctcgcctgcatgaacggttcaggccgtgccttcggattagataaatgggttgttccatatttacaaaaacatctcggtcactggcgctacggccaacaacgtgcactatacaaaaatcaatgagtgcgtttgaaacggtttgactttaagcattagcacagggaagcgaattagcgacatagtcgatgatttgattcacagcgctaaacgcagaaagttaacttcaaagcacgttataaaactgagtgcatcaaaagcgtttattctatgcggattagcaaaattagacgaataactagcgtagctagttgtttggctaatagtgctaaacgcaatagaatgcttttgaaagcacattataaaagcaattcacagctatcaaaaggagggggttatgacagacaggcttttgtcataaccccttttattgctattttagagagaaagactgacgcctatgtttaaacaaattcgcgctaaccgttacatcaaaatgattcgccctggtgatataatagtagtcatcggcctgtttattctatcgtttgccccagttgctgtttttagttggcacgaatggcaaacgacgcaagcagcggattcaaacgcgcaggtattgacggcctacgtcaaacaagatggcaaaaccgtctacaaagtgaacctaaccacccaccatggtgttagccacttcacttatcgcgatgccggcggtgattacaacaaaattaaggtaaccgatcatgccattgaggtcactgaagccaattgcttcaatcagattgatgttaagcgtggcaaaatttctaagccaggccaaaccattgtttgcttaccacacaagttactgattgaaattaaagccaaggatgggaccgacacgggcgggatggtttctgcctgatttaaaaggagtacagcgatgactaacgatcaaacgcgtaaatacatctatattgcactcttgtgcgctcaagggattattattggccttgtcgaacgcgcgattccatttccatttgccgtagccccgggtgctaagttgggactagccaatttaattaccatcatttcgttatttaccctaccggtcagcgactgctttttattgatggtgatgcgaactgttttatccgccttgctagggggaaccctctctacttttatgtatagcattgctggggcaacgctaagtttctttggcatggtactcctcaagcaatttagccgccgctttatgagtatgattggcatctcagctgctggtggtctgctctttaatgtcggtcaactctgcgtcgcgagtttcattgcccagagttggcaagtcctcctctatctaccagtgcttgcttttctcggtattctcgccggaattgcggtcggcgtagccgcgaattttttattcgaacatgtcaaaaccctgacttttttaaaagcccaacacgaaatttaatttaacaaggagttaattatggcgaaagtacatgccatgtggcagaactatccagaaatcgaaaccgaacttgcgcaaagtcttgcgctcattgaagacaacattcacaccaaaaatcaagccgtcaccgacgccattttaaagatgattagtgctggcggcaagttgctccgccctgcttactgcttattattttcacagtttaatgcagtcgatcgacagaagatgatcgcattagccgccgctgttgaaacgctacacactgcgacattaattcatgacgacatcgttgataattccaatttacgtcgccatcaagaatcgattcaagcccgtttcggcaaagatgtcgccgtttacgctggcgattacttattcgttgtctgcttcaagttactagccaattatgcgagcgatttgaagagcatccaatttaacagccaaacgatggatcaaattcttgacggtgaactcagtcagatgacaacccgatataatctcgatttaacccccgaacagtacctacaacaaattaacggtaaaaccggccaactgttcgcgctcagttgcttcatcggtgcttacgaaagccaaaaaggcttgaagtttgcccgccaagccgagaaaatcggcttaaatatcggtctcgccttccaaattctggacgatatcttagattacactcagaccgatgtcgattttggcaaaccagttctcgatgacatgcgacgcggcgtctactcgattccgttaatcatggcactgcaatccaatcgccaaacattagcaccctacttggaaaaacaagcagctatgactgatgccgatgtgcacgctgttcaaggcatcgtccgtcaatctggaagtgtcgaaaaagcccaagcactcgcacaagattacacaaaccgcgcactcgctggtcttgcgaaactacccgacatgcccgcaaaaacaacgctacaacaattaactgaacgtttattaaccagaaaagcctaaaaaagacggacaacatgttagaaatgttgtccgccttttattctcgacttaatgctcaaaagttgaccaagcttgaatgcactcattttttaacgtgctcctcgaacagtcttctccggttaactgcaaaaagggcattatggcaagtcccgccataatgcccttttccctgttaatcctcaaagcctacccagttcgagtcacactctttttttaagctgtttatcggatttgaaccgacgacccccaccttaccatggtgatgctctacctactgagctaaaacagcatttcacggttgattaacaaccgtgatataagtatatcgaaaaataaaaagcgggtcaagcccctagagaccaacttctgtatcagaaagtgctaattcaaaatgttgttgtaagaatttagcgaccccgtcattcgtattcgtttctgttacataatttgcagccgctttgacctctggtaaggcattgtccatcgcaacactgtacttcgctgattgcaacattcccaaatcattttgcccatccccaaagacaattgtatgatcggcatcaattccatgaatcatttgaatctggcgaattgcagtggctttatcaatcccggttggaatcatctcgatgttgtctggaccagaagaagacaagctcatcacagcttgatccattaatcgttgtttagcggctgctaaactctctggatgaccgcgaccaatgataatcccgttagtaatctgatcacttaaattcaacaacatttctaaatcagtcaccggttgattatcaatatcggcattcaacaataaattccccgcatcgcgcgcaacaaacttggggatttcttgggtatagtaagctgtgtcagtggtaaaaaagtgcgcagataaattgggatctgctaaacatgcttcgtaagcagctttgagcgcttttttacctaaataatgcttgttcatctgatggccattttcaaagacagcaccgttagaagccacaatccggacatcatcgttaatttgccgcgaaattacccggccaagattgtacattcggccggtggcaatatagaaaatcacatcgcgtttttgtaatgttcgaatcacgcgtttggtcaaaggtgtcacgatttgatggtcaaggaccaacgttccatcaatatctgaaaaaactaagtaaggttccatatgaattcccctcaattttgatttgtaaccggtaacacttcttcgttttagcgtatttagatggggaattaaatagccaatttcgtttcattcacaatcaaacgattaatttatagcagtaagtcttgctatttaccatgacatagtttattatcaccttatttggtaattttaataatgtctgaaggagtttttggctatggataaagaaaatctcaatatcggtgatttagtaaccggcaaagtgaacgaagacctagatggtgcatttacaggaactgttgaaaaagtatatgaaaactccgctttaattagcattacggatttcgatgcagccgacaaggccaacgtttcggaattaaacaacaagatcgttgttaacctcaagcaattaaaagctgctaaagcaaaataaaatagaaaaaagcccaccgacatttatttaccggtgggcttttttctatgctttaatttcgctgacttgtaaagaagcattcaataactgttcagcaacgagcgccaattgctgggcgtcaaacgctggtttaaacaatgcagtgtgcaaaacaccgattagaccccaacaacaataattcaaaatataatcagcgttttccggctgctgaaatggaatcacccgcttgccgtgagtcacggtcaacgcaactaatttattcattaactgtgaatcgggattacgacacaatacccgtaacatagactcgttgtcttgcacatatgacaagacccatctaaagaaagtttggccaacaatctgtggttcagaaggcaactcaaaacgttctagcaactggctgaactcatttaaggtaaaatcttctgtctggcttaaaagatcgtagatatccgtataatgcaaataaaacgtccgccgattaatatcagcccggtcggcaatcatctgaattgtaatctcattaattgggtgttttagcaggagctcaataaaacttgtgcgaattaacttatgtgtccgtttaacccgtctgtcttgcagattaaccatctttcagcctccatttacatcacaattgactaacttgtgtgcattataacacagaaacacttagattgattattgttgaatcaactaaccatcgttatagtagccttaataacaagtcatcggaggtcggcatatgtttctaacaatccaagaattacgccataataagttaaaatttggcgcactgagttttatcatctttttaatcgttttcctagtactcttcatcaccggactagctgccggtttagcaaacgatagtggcgcggctattaaaaatacgccggcgacgcattttgttttacaagccggttcggaaagtcggttgagtcgctcggcactcacccaatctgattggcaagctctcaaacaccaatcactgacacccatcaacgtcacccaagccaccatcgagcggcctaaaaaacaaacaaaaactgatattgcctacattgcagttgacgctacgagcttcatgacacccaaagtcacccaaggtcaaaagctgtccaaccaagccactcaaaaagtggtggtcagcagcaaattacaagccaatggttaccaattaggcgacaccgttaaagatagtaccactggtcagcaatttaaaatcggtggctttagcaagcagatggcttatgcccatacgcctgttatttatttaaaccaccaccagtggcaaaccatttttccaacgcaaaagacgacctataacgcgtttgctagcaaaccgcccttgtcggttaacaagcactaccaagtgatcagcaaacaaaccttgattgataacatccctggctactctgcagaacaaagttcattgtacttgatgatcggctttttatacgtcatctcactgtttgtcctcgcaattttcttttatatcattaccctacagaaattacgggactttggggccttaaaagcattgggcacaaccacacgctatctcagccagcacatcatctctgagattggcttgttaacggcagtggcgattcttttggctggcggtatcattagtgtcatcgcccagtcaatgcctgccagcatgccgtttatgctcacagcaccaacgatcatcggcaccagcgttctatttttagccgtcgccatcctaagcgccctattatcccttattcaggtgattcggattgacccgatcacagctattggaggtcattaatatgtcagcaccgattttaacactcgaacacatcaccaaagattatcccgatggtgatcaaattaatcacattttaaaagatgtctccttcacgattcagccaggtgaatttagcgccatcgttggtcccagcggtgttggtaaaagtactttgttgacgattatgggcgcgctcttgcaacccacagccggtcgtgttaccttggccggtcaagaacttgcaacactcaatcgtaatcgtcaaacacaaatccgccgcgaatcaattggttttatttttcagaattcagaattaattccctatctaacggtcactcagcagctgacttttttacaaaaaatcgcccgtcatcgcgatcaacccgccgctgaacaattactgacacaacttggattaggccatcgattacacagttatcccgccatgctttctggtggtgaacagcagcgggttgccattgctcgggcacttatcaatcaacctgcactcattttagcagacgaaccaaccgccagtttagatgcgcaacgtggtcgtgaaattgtccacttaattcgcgatgcagttcatgaacaaaaacgcgcagctgtcatggtaacacatgacgaacgggttttagatctcgtcgatcacgtttggcgtatcgaagacggtcaactccgccaaaccacataaaaaaaacggtcctttcacaacttagcgttgttgaaaggaccgttttttagttccagaggatagctactattattcgacgttttcaaatttaccccacaagttcattgtggattgaatattaacaaaggcattcggatcggcatccttaacgacccgttttaattccgttagatcgtattttgaaacaactgtcatgatcactgttgtttcttggttggtatacagaccagttccatctaattcagtcgcaccatgaataaagtcacgcattcgcttcttcaattcttcaggtcgcttggtaaaaatcgtcacagtcaccttttgttgttgaatatagatataatccatcaacaagcttgaaacaaagatttcgacgatactgtataaggcagcaccccaaccaaagaagatgcccgctgcaagaatgatcattccgttgatgatattattcacaacaccaacccgtttgccagttaagcgcccaactaacgtcacaatgacgtccgtgccaccagttgaaaaacccgctttaaaacacaagccaacccctaaaccaatcaatgcacccccgaacaaggcacctgcaaatcgttcggtgacaattgggtgaacaggtactggaatgaccttcaagaaaaggacactcgtaaaaacagcgacgatactaaaaatcgcgtactgatgattaatcttgaaccatgccagaatcaataatggcacattcaaaataaagaccaacatcgcaacacttaatgagccgcccatatagctgactaacgaggttagtaattgggcaatccccgtgaccccactcgaatacgtcttcgccggaatcaagaacagattaacactcaccgccgccaaaaaaccgtataccatcgcgataataatttttttcgaatttccttttaaagcaatcactgtagcacctccatcgattaaaaaagccacactccccccttggaagagtgtgacaaatgattaaagtgcgcacttggctataggttcttatccatgacgaaggtcaacttagaaagttgcgttccttctgtcaccaattgcgctaacaaatcggttgttgcttcatggtaatgtgcagcaatttcatgattttgctgggttaagaaatcagtggcattcgcttccgcctttacagcagcatccaccgtagcaatcttagttcttgcccattctgataatgctttttggtagtcaatatcagctttcttaaaggccccgtagtgtgattcaacaatcattgctaatgcttcatataaccagtaagcgttcttcaactgcatcttcgctggtagttcgcgataactttcatccgtatccatcgcattcgtaaagaatggtacgtgtggacagaatgttggtacccccaaacctaaccattgaacaccacgcacagcatctggcacattgtttctaatctgacagatatgtgagttttgcgtccgtgaaagtgaaattgaccgataaatcgtcttttgttcttctgtcccattaccaagtggatcgtaaatagtttcgttataatgtgattttaacacatattgaacatcttccacacttattttacggttagccttgcgaatgaaaggcaagtcactcgattcaggttcttgtttgatttcagggttcaaatagcgttgtgcataccaaacccgtggtgtgttatagtgacgatctaattcagtatccgtcccaaaaatcttacggaagttccattcagcttcactcggattcaagtgattttcactgacgaattcttgaataccttctgaccacatgtaattttctggatcattaaagtcgacatcttcgatggcaatttggttagcggcaactgcataacaatcatccggaatccgaacagcaacccagtgatgcccagtaacaatttcttgataccaaacttcattttgatcactgtattgaacgccattgccttcagctgaaccgtatttagcaatcaaatcccccatcaattgaaccccttgacgtgcagaatcgatgtatggcagaaccaacgtacacattgaatcttcagctaaaccttgcttgaccaacggatcataagctaatacccgttcgttggcataaacactttcagttgcggagagggcgacatttttttcattaatcccgtcttcttcatttaaaccatcacttaaatcgccgttgggggttgatgtgtaacgataaccgtccgtcggtaacggcatggttaagccgttatattttgaaacatatgtctcatgtcgatcatgaactgctggttgtacgaagaaccgtttaggatggattgcatagaagcgatcctcatttcgcgaaatcatcgtagagccatcaattgacgcattcttccctaccatcattgaagtacatgctgataattcgattctgtctgtcatttggaaggaaaaacgaaatcgggatttaaattttcaatctcaaaagagcagttagaaaattatgaactgcttgaagcgcttagcgagcttgaagatgatgcaatggccttgcccagagtaattaaattacttttgggtgatgatggtgctaagcggttgaaaaaccatgtgcgaaaacttgatggcattgtgccacccgaagcgatggcggatgaaatcaaagagattttacagagtcaaaaacaaacaaaaaactaatgatccttgccaagatgattaagctggacgaagatgccttaatcagtgatctcgctgaaacctaccaaatatacgactatcagcagctaccgttatcaacggtggctgctttttcgtgtaacttgcgcaatgattcacgcatcaaattgaagatgaaccagcaagcagtgccagtcaatacgcaagtgctcatggggattctagatgctgtgaacctgttgttgtggtcgcggtctaaagatgctgagcgcggtgccaaaaggccgcaatcaatcctagatgccgttatgggcaatcagaaaaagcaatctgcagattcggcagtcacttttgattctggcgaggatttcgaacgaattagaaacagattaatcataggaggtggaccaaatggcgactgagcttggacaagcatacgttcaaattgtgccatcagccaaaggccttagcggtgccatcaaagggcagttagatcctgaggcggattcagcgggtaagagtgccggctccaaaattggcaccggcattaagcttgccgcaatcgcaggtgtggccgccgttggtgccacacttgggaaaattatctcgtcatcattgtcggaaggtgccgacctccaacaatcgcttggtgggattgagacgctgtttaagggcagtgctgataaggtaaaaggctttgccaatgaagcgtacaagacagccggtttatctgcgaatgcctacatggaaaacgtgacgagctttagtgccagcttgctccaatcggttggcggtgacaccgaaaaggcggccgacattggtaacatggccatgattgacatgtccgacaatgccaacaagatggggacgagtatcggcgacattcaacacgcctaccaaggctttgctaaacagaactacaccatgcttgacaacttgaagcttggttatggcgggactaaggaagaaatgcaacggctcttaaccgatgcgcaaaaaatctccgggcagaaatacgacatgagcaatttagccgacgtttacaacgctatccatgttgtgcaaggcgaattggacattacaggcacaaccgccaaggaagccgccagcacgtttagtggttcgtttgaatcgatgaaggcttcactgtccaatgtacttggtaagttgtcactgggtcaagatattgggccatcgctacaagctttggcagaaacaacatcaacattcttgttcaacaacttcattccaatggtcggtaacattttaaaggcgctacctggcgcaatcacgacattcattgcggatgccgccccgagttttatggcgggtgggcaacagttgatcagtggattaacgcaaggcatggcgggtggcccgagtgctgtcacagcgtcattgggtggcattatgtcaacggtaacgcaattcggttcaacagttaaaacagcattgcaatcaatcttccaatcaattgggccggttatctcaagtacgttgggtacaatctttacacaactgccagcactattcacaaccgttgtaggtgcgattacaccaattgtagaaatgattggtgacgcatttaccaaacttgacttcagtggcttgcaaaacttagtgtcggcgattgtgccagctgttactgccggctttagcacaatgatgggcgttatcggtccagcgatttcaaatgtaatcacgtcgtttgtcggattgtggaatgcagcccaaccactcatttcagtattagccagtgcactaatgccagcacttcaaatagtgggcgcctttttaggcggggtgttcaaaagcatcttgtcgagtatttcaatcgcattcgatgccattcgaattgcaatcggatttttaacgccggttattcaagttctggtcgccgccttcaactttattgcgccggtattaacgactgtagccagttggattggtcaacttgtcggattattcggcaatctgggtggtgtcagcaccaccttgagagctattatctccgatagctttaacgggattaaatcagctatttcggtcgctggtagtggtatctcagccacaattgaaatcattaagggtgtttggacatcactgagagcggcaggctccgcacttgggtcaatgttgtctgcaatatggtctgggattaagtcctcagtgtcgattgctggcggtgggattagtggtgcagtaagtggcattcgagccgcttggagtggattgcaagcagccgggtcagcgcttagagccgcgatttcaggtgtttgggctggcattactggtgcagttcgtgtggcacagacaactatttcaggcatcgtaggtagcatcaagtcaatcttcggtagtctcggtaacattaatttaagcagcgccggacacgccatcatgaatggatttcttggcggattacaggcgtcatttgaaaaggtcaaaggattcgttagcggtattgctggttggattaaggagcataaaggtccaattagttacgatgcaaagttgttagtcccagccgggagtgcaatcatgggcggattaaataagagtttgcaagatgcatttcgtgcggttcaatcaaccgtttcaggtatggccgacaagttgagcctatcaatgacgcccgccattgcatttgacgaaccggccgctttgactggcaacaacctcgcgcagatgatgcgcccaacgccaacggtttacaacacctattcagcaccaacccaagacgtagccaacagcgcggaaatgcttgacttactccgcatcattgccgataaacgtactgtagtcgatggttcgtcattttctccagcgtatgaagaatacgggtcgacagaacgagcacgtcgtaatcaactaaaagcaaggggagttgcaattgacaataaaatctaagtattcatacgggattgaattcaatgggcacagatccaacgactttggtttggacgtgcaagccaaaacggtggggatgcccgccaagaataaaatcacgcaggcaatcccgtttagcaacaccgtcttggatatcagtgatctatacggtggccagacgtataaggagcgcaccatgaaaatcacgtttattgtgcgtgatggagaagaccaatccaaagagcgtctatattcgttatggacgcaggtcgttaattggttgatggcaccggcgcaaaaagtgaagctgaaagacgacatcatgcacaactattattacctgggcgaggtgcagaaagaaccctcatgggatgagatgcgcgcctatggtaaattgtcggttgaatttacgtgttacccgttccgcatcgatgaactggcggaaggcaacgacatttgggacgaattcaacttcgaaacggatatcgcgcagaatactgagtttgatatcgtcggtaaacgcaccattacgctgtttaacatcggagccacgtctatctcgcccgaactgatcgccagtgcgccgttcacgattgaagtaggcggacaacgatttacgcttaacgctggcacgtcaagcagtccggattttatgttgccaaccggtgagattaccatcaccgtgattggcacgggtaaactagcatttaattggcataaggagttgatctaatatgtatcgggtgacggtaagagatggctgggacggcacggagcacacaatccattcggagaacctgaacgacaccaagcttttaacggctaagattatgcgggacatcgatgcaattgattcgtttcaatttagcattagcccagagtcaccctattacaacgactttaaagggatgacgacgttcgtcaaagtgacgattcccaagcgcaatcaggtgctatttgaagggcgtgtgctcccaacaaccgattcgatggcgactagtggcgagtttaacaaggaaattacctgtgaaggcttgctggcgtttctacatgattcaacgcaggactattacgcgctagcaaacaacgacttgaagtcgttcttgcaacacatgattgatgtgcataaccgtcaagttgatgcgtttaaaaaaatcaagctggggcaagttacagtgactagcccgtctgataatgtctacaagtcgattgatgactcaaagacgacctacgagaccattaaagataagctgatcacgaagtacggtggtgagattcgactgcgccacgaaccggacgggttgtacctcgactacatgcccgagattgccattcaaagcaatcaagagattcgattagcgagcaatctgctgtccatcaaaaggtcgattgatcccagcgctatgtattcgattatcaagcccctaggtgcaagggctgaaacgacgacgcaagccaatgagggagattccgaaatatcacaaccaagattaacgattgagactgtcaatgctggcagtccttttttagtctcgcaaaagttggttgatcagattggccgtgttgtgcatccagaggtttgggacgatgtgaaagttacgtcaatcctgaaatcaaaagggcaagccatgctggacagtcaacggctgatcaaagagcagttccaagtgagcgcggttgacctcagtcttttaacagataagaccattgatacgtttgaagcgggtaattaccatcgcacaattaatcctttgatgggcattaatgagcgcttgcggattgtcggccagtcgctggatttgtgtaacccactcagctcaacactctcaatcggcgacaagctgctaagtcaggaagactacgagtcggcaattaagttgaaaaacgaggtcgctattcaagagatgaaagtcaaggtggcacttcaatccaccaaagtcaccgccatcaccaccgaacttgccacaacgaccgagaatctaaccaggcttcaaaccgagtacgacaagttaattgagaacatcggtgatgcggatttcaaagcaatcatagccaaattgaccaagctagagaatcaaacgactacaatcattaccaccctcggtgagattggtcaaaacgtgcttgatttagaggaatttaaaacaaatcaagaaacgctaaatacaaaacaagaaactgccaatgaagattttgaaaagcgcataactgcgttagaaggaggtaataaatagtggcagatgaaatcaaaagagatacagtagattatcgtgatccaacgccgttcgataattcaaaattgcaatcactaagtgaaatcagtaaagcgatgcgccacaaaacttatggcgaagatacccgggaagcgatggcccagcaaggggaagcattggttaaaattatgcaagaaacgggcggcaatcaatcagcagaagtcgtagcagctcgtagcaattttgagttgctcggcattcgcgaagacgcgcaggacaatgctattgctgttattaatgccaataaagctgataaaacggaaatcgcagctttaaaatctgaaacagatgcaaaattatccgtaaagcgtaacacggctactaagattaaacgagcagatatggacaccagcaacgacggcgctaaactagggttaattaatctttcagaagaggttcaagctgcaatggctggaaaagcaccggttatcggaagcgttgaaaatggatcaataacggaacaaaaaatcgctgcaggagcgatcacgggggataaactagtgcaaagcgtcctatccggctacagcttgattgttggcggagagattcccaattatgaccaatcgacgagaacgttcacgtttggcgatagccctaagctagcgctaattgcttggggaagtattcacagatttcaaatcccaaaagggcttaaaatcattaacacgccagaaaacgactacacggcgacgaggctcatgtttaatacagaatcgttgtcgtttagatttatctcttgggataataattatgaaccagccgaaatttgtataatgagtgttcgcgcagattggggggtgaactaggaaaaccactcattagcgccaatttcccggttttaattaacggagattatcctagtgatcacgaccgttgggctaagattgttccttcgccgacctttaaaccggactataacgactcaacccatgtttttgattttaattctcaaaaacgccttacgcttaaaaattcatacgagcctaaagtctttttgttgttaaaagactcaaaaggcgtggttatggaagataacgtaacggttattaatacagtggcagaaagcggtgcttcaacatatgccagacttatttattcagagagcgacaatagttttaaattccaaagaatcgacgctcctttaaaatttaacgactatacaattgcgatcatcagagataattctactgacaaaaatgcttcaacgagacaggcgatcataacttccccgtcagaaataacgattaacggtcttcctaattcaacttatgaagaagatacgtatgcaaatgtgattgcgattaaccataggggggcaagcgattttgcgccagaaaatactatgccggcgtttaagatgtcaaaaaaactagggttcaaatatgtggaaaccgatattcacttcacatcagataatattccagtgttaatccacgatgaaacaatcaataggactgcggttaatgatgacgggacagcgatcactgacacgattaaggtggcagacaatactcttgcgacgttaaacatgtatgattattcattaatcgaaaaaagacgtgtggacgcttatattggcacgaaaatggcgactttggaagacctacttaaatacggcaaacgagcaaacctaaaactagtgcttgaacttaaaatcgacttaagcgacgcacaaatcgacactgtgatggggctggtctggaaatatggcatgcaacgtaatattatttggcaaagctttgaagcgtcgcgctttaatcatttaaaagcactagatccaaaggcaaaactggcctttttatttggcaaagaaacaaccgctgatgataacctagccaagatgttaccttatagaaatgatacgaacgaaattatagctagtgttcaagcgggatcaaatcgagacgatttttataaatactcaaaaaatgatattagggtttttgtgtggacattttatgcagacggcgcggtgttggattggggagttaacaccgcagtaagcggtattatgacgcaaggagatattcagcaaggttatattctttctagacaataaaaaaagccctaatagggcttagtctaaatcacgaatcctttttgctggagtcccaacgtaaacgccattaggggtagttgatttggtcacagtggcattagctccgataacgcaacccttagcaattgtaacaccgggcataatggttgcattaaggccaatccagctgccatcttcaataataattggggcttctttgtggattccagccctttgttcagcagttccgatattgtggccgacacacaataatttaacttttggccctaaaaaaacgtggtccccaattgttataccggttccgggatagtttcgagtgtagatatacagatcatgattaataaaagcgtgactaccaattgtaatattatcagtgtcaatataatcaggctggcaaatataggcgccagttccaactttaatccccaatattttgagtacaaaatgaagtgcttcataatagttagacaagaaatctaacagttatggagctctttttatatggtcaaatacagttctagtttaaaagctaagatagttggtgagtatcttcaaggaaatattagtgccaaaggaattgccgaaaaatactatttgcctagaagacaagttgctcattggattcaaagatatcgtttaagcggtgtagattcgcttaaacgtagaaatgttaaacgagaattttctgccgagtttaaattagatgtgatagactactatcaaactcatgacgagtcacaaagtgaggtagccgctaaattcgatcttataccatgtcaaattagtatttggcgcactacttttaatcgagaaggtatattaggtttgaagcctcgtccgaaaggtagaccgaccaaaatgaaacgaaataaaaagcaattacgtcaattagtaaacaaaagtgaagtagaacgtctacgagaggaactcgcagaaaaaaacaaggaactttatgacactaaattggaacgtgatatcctaaaaaaatcagtgaccctgttcggaccctcaaagggaaacgaaaaacacaaatagtagatcagatcagggctgaccaagacgaattatctaaatccgatagatataaaataggtgatattcttaatgccataggcattaagaaggctacttatcatgacgagcgtaaaaggcttaaaaattatcaagacaagtatgcggatgtgaaaaaagaaatcattaagattactgaagatggaaaatttcgaggccggctaacctacggttatcgccgagtacaaaaagaacttttaaagttaaatatccatttgtctgacactgttattcgtcgtctaatggatgaattaaacgttcaagtatctatgtataatcgtcataagaatggcaaatactcttcatataaaggcaatgttggaagaatctcagacaacatcttgaaacaaacttttaatgagacattgccctacaaagtactacatacggacgtaacacaagtccgattgaaagataatagttgggcgtatatttctgctattacggatgaggctagtaaagaggttttagcatttaaaataaatgatagtcctaatagtagcttgataatatcaactctgaacgagttgattatcaagctacctgaatctgtgcaaccaataattcattctgatcaaggatggcattatcaattaaattactacactgaaaaacttaaaaataataatttcattcaaagtatgtcacgtaaaggaaattgtcacgacaatgccccaatcgaaagtttttttcatctttataaaacagaatgtttaaatggattcccaccttgcaaggatatttctgagctcacacaactttctaaagaatacgtcgaatggtttaatcatcgacgcatttctttgaaaacaaaaaatatgtccccggcagaataccgagaacatacattagttgcttaaaattttaattttgtctaacttttctgttgcacttcaaaaagcatagatttttcaggtgttttgtttaaaagatgtctaataaacattagctttaaccttttcatagcatcgcctccaaagcataattatatcacgatattaggccgctagctgcaaatatgagcaaataaggaagggatagaacgcatcgcatccgaatgatgaaggttatcggaaatttgctgaaaaatcgctaaatttttttctaacaattaagcaatcccattatggattgctatttttattgcatttaaattaatactgtaggaggaataacatggtttgagtaatgagaaagaagatttaaacgtgacagagatgctcattgacatccgtgagcgcctagtacgcgtcgaaacaaatactaggcatctagattcgaccgcaaccaaagttgaaaaggcttatagtattgccaaagaaaatcaaaaagatattggagacttaaatgagagatctaaatggactcaacggacagccattacagccatcttgattccaataggtctttttttatttgaaaaattaataggagggtaattaatgattaaaaaagtagattggcattcaaaggtgttgtggacttcgctgacagctctagtcattgtgttagttcagcaagtggccaaagttttcggaattgaattcagcaacgatttagctagccaagtacaaggcatcgttaatacggtgcttacaatcttaggcttaattggtgtcgtctatgacaccacgaagggagattcaaaatgaaaaaatcaatgaaactagtagtcgccacgatgacggctattttatttgcccaggcatcaactgggttagcgcaagcctctaaaggtgaccagggtgtcgattgggccgtttatcaaggtcaatttggcaaattcggatacgggtcagacaagtttgcgattgctcaaattggtgggcacaacgccaatggcctctatgaacagtggacttataagacgcaagtccaatccgccatcgctcagggtaagcgggcgcatagctatttttggtgggaaaacatccataatcgcgccaccgctgatcagactttaaattatgtcttaagcaaaatgcaaacgccaaaaggttcaatccttgcaattgacttagaacagggcgcgtcaacgtacgctgttaataccgatttagttatgtacgccatgcaacggattaaaaatgcgggttacacaccaatgttatacggtggccgtgattatttgcaaaaccatttaaacgttgatcaagttattgccaagtttggcgacaagctatggttagccgaatatcctaactacgcggtgacgccgaaacctaattacaactttttcccatcacgaactggtatcgccattttccaatttacatcaacgtatatcgcaggcggtctagacggtaacattgatttaacgggcattaccgacaatggttacacgaaacatgataatccggtgactgaaacaccggccaccgatgcgggtcaagaggcggacgacactgccaagaaagaaatcaaagtcggtaatacggtcaaggttaacttctcagcgcaacgttgggcgactggcgaatcaatcccaacctttatcaaaggtcaatcctacaaggtgcttcaagtcagtggcaaccgcgtgctattaaacggcgtcatgagctgggccaacaaaaaagacgttgaaattatcagcaccaacactggtaacacaacgtccggttcaacttatacagtccaatcaggtgacagctggtggtcaatcgccaaccgtcatggcatgagtatgtataatctggccgcattaaacggcaagacaatttatacaatgctatatccgggccaaacaattaaggtgtctggtgcagcatcaactaaccgcacatacacagtccgatacggcgactcattctggttaatcgccaacaagctaggagtcaatatgtacacactagcagctaaaaacggcaagagcatcaactcgatgatctatcccggtcaaacattaacatattaaaaaaagccctcgttatgagggcatacatattaattagtgaacctattaatcaaaaatggtacaagttttagttttgctttaatccggtatctatcgtttacttggtatttaccattaaaagccatagaaactgttgacttaccagtatcagtttcaagtttaagttgatactcagggatggcatctgtttcgaagtaagtaattttataagatgtcccaggttcaatagtcaccggttttatagatttaactggcttataacttccagtaggaataggtgagggattatatttctcaatcgttagtttcacaggtgtcgtttctggcgatatgtacagaactttatttgcatcttctgtcccatttagggtgatatcatcagaaatattcttatacaagggggctgtattgattggatagtgatttatgcttatatcttcatagtaggtgtagtttttaaaaaatgaaatccatagtattaaaaagaaaaggatcactttaacgataaaagataagaaatctagcgggtctttattatttaagtaccaacgatatggattcatttaatcactccgtgtatagtttattattctattatatcgtaatagttctctataaaaatactagaattgccgatattcaactttaatattgttatcaagtaatttgcgcagcacgttcttatattcctcaacccgctcaaaggcaaccactcccagcccatgactgtaagtagcgccgtccatttcttctagataaaaattataaggttcattaaaccggtctttaacaaccggcaacgagtatgagtgtcgtcatctgatcacctcgcaattattatacaataaacgtttgacaaatacgaatgtatgttcgtataattaaaacgcaaaggagtggttgaaatggaatacattagtttaaaaggcacgatcaacagcaccgttaaagttatcagctttaccccgtatctagtgcggtttgagcttaaaacggatgagcaatcctataactgtctagtcgctaaagatgcgtttaacttcgtttacctagcagaagagaatgcaccaatttcaatttttggccactttaataagcgcaagcaattaatagtcgataaataccatgtcaagaatgtaattcaaaaattatctgttgtaagatgagaacagaacaaaagtgggagcgagtcagatggaacaatttgcaccagcgcggatcaatgagcaatattatttaactctgaatgagactggcaaagttgagctacacaaagagggtattggggtggttggcagtatgagctactattacactcggaatgacttgcccttgtttatctgtcggcatgaacctagcgccaatttaaggacaattcatgatataatggtgcaactagatgaacagatgcaaaagatggttgaatgtggttgcttaatggttggcggtcaaaacgttgcagttcaaagataagctttaacccgtagaaaagagaccgcctaatttaggtggtctctttttgagtatgtaataggaaaagacaattattattgaccacatatggagtacaacaaaaaagacctgccaacataaaattgacaggtctttttacatttaccacacaagaaccacacaaagtgatgataatcgttggtataaaaggtatatctatgcgtcacccgggagtcgaacccggatctcaagaaccggaatcttgggtgctatccattacactagcgacgcattccgcgtactcaacagtacaatatattatattagcggagttaagcggaaatttcaagtgtaaattttgataaatcgcgataaatcaacgtttaaaaaatattcggaaagaaaacgtattcatcaaccccaaagcattgcatctgttttctgcacttgttataatggtcttgttcaaaaggataagttactagttttagtaagttgccttttattttttgccaaccatgggtcgactaatgacacagatggacattttatgtcccacggaaagtaggcgatagcaattgcgcgatgaattatctgcaatagaagcggttgcgccagatttcgtcggtatcattaagaaacgttaccaggtgttacaacatatcgattggctcgcgccagttggccgacgaacgcttgcggaacaactgaagatgagcgagcgagtaattagaactgagacggattttctgaaagcacaaggtttgcttaattcgtctaaatcaggtatggttttaaccgtgaaggggaatgaaaccctcgatcagttaagacaagtaatggatcaattcttagggttacatcagactgaacgtcagttgagtcaagtcttaggcattgaacattgcttgattgtttctggcaatagtgatgaacaaccaaaagtcctcaccgaaatgggcaaattagtcaatagtacgttacaattattattaccacaagggcaaagtattgtggcagtgatgggcggaacgacgatggctgaagcagctcatgaactttcaactgatctatcgaaacagcgcaatctaatctttgtgccagctcgagggggaattggtgaaagtgttgatattcaggccaatgcagtctgtgccgaaatggctaagcagacaggtggtaagcatcgggcattgtatgtgcctgaacaggtgagtgagaagacgtacgcgcctttgttagaagaaccaagtgttcaagaagtgttaaaactgattgaacgaagccggggtgttttacacagtattggtgaagccattgcgatggctgaacgtcgtgagatgccgattgaaaccatcaagatgcttaaagaaaagcatgcggtgggtgaagcctttggctacttcttcaatgcacaaggcgaagtcgtgtacaagattccgcgaatcggattacagattcgtgacttattgaatattccgtgtgtactggcggttgcaagtggtgcttctaaagcccaagcaatccaagcgtacatgcaccttgcacctaaacagacgtggttaatcacggatgaaggtgccgcaaactcgattttacaaggggcaaccctttaaaataaaaaatttttcatttcctaaaggaggaaattctattatgactacaaaagtagggattaatggtttcggacgtattggtcgtttagctttacgtcgtatttacgcaacaaacagtgatgtattggaagttgttgctatcaatgatttaacatcaccagacatgttagcacacttattaaagtatgatacagctcatggtcaattcaaccacgaagtatcagctacagaaaacagcatcgttatcgatggcaagaacattccagtttatgctgaatcagatgcacgtaatattccttgggttaagaatgatggtgttgacttagttcttgaaagtactggtttctacacatcagaagaaaaatcacaagctcatatcgatgctggtgctaaaaaagttcttatctcagctcctgctggtgctgttaagacagttgtttacggtgttaatgatgacacaatcacagctgacgataacatcatctcagcagcttcatgtactacaaactgtttagcacctttagctaaagcagttaacgatgctttcggtatcaaagctggtacaatgacaacaatccatgcttacacagctacacaaaaattacaagatggtcctgatcgtggtggtaacgtacgtgctgcacgtgctgctgctgctaacatcatccctcattcaactggtgctgctaaagctcttggcttagttgttcctgacttgaagggtaaacttgacggccacgcacaacgtgtcccagttatcactggttcattgacagaattagttgcaactcttgacaaagaagttacagctgacgaaatcaacgctgctgttaagaaagttacagaaggcaaccaatcatttggttacaacgatgatcaaatcgtttcatcagatatcattggtacagaattcggttcagtattcgatcctactcaaacacaaatcgttggcggtggcgcaggccaagttgtcaaagttgttgcttggtatgacaacgaatcaggctttactgctcaaatgatccgtacattagaaaaatttgctagcttaatctaatttcacttttgtgaacttaggaatgcgatagcattttataaggcgggaggaggtaaactccttccgcctttttttatgaaaatctaggaggtttgtccacatggcaaaacaaacagttgcagatttaaaagatattaaaggcaaaaaagtcttagtacgtgttgactttaatgtaccaatcaaaggcggcgttatcggtgacgataaccggatcgtagctgctttaccaacaatccaatacatcatcgacaatggtggcaaggcaatcttactttctcacttgggccgtatcaagagtgacgaagataagaaagaattgacattgaaaccagttgctgcacgtcttggcgaattattaaacaaagacgttgctttcgttgcttcaaacgaaggcaaagcattagaagatgcaatcaatgcgatgactgatggtcaagtattggttatggaaaacactcgtttccaagacatcgacaacgactttggcaaacgcgaaagtaaaaacgatcctaagttgggcgaatattgggcatcattaggcgacatgttcgtaaacgacgctttcggtacagctcaccgtgctcacgcatcaaacgttgggattgcaacagctatgaaagctaataacaaacctgcagttgctggttacttattagaaaaagaaatcaaattcttgggcgaagcagttgacgctccagaacgtccatttgttgctatcttaggtggcgcaaaggtttctgacaaaatcggtgttatcgaacatttattagctaaagctgacaaagtcattgtcggtggtggtatgacttatactttctacgctgctaaaggtttatcaattggtaactcattagttgaagaagataagatcgaattggctaaagaattaatcgaaaaagctggcgacaaattagtattgcctgtagataacgttgttgcagacgcattctcaaacgatgctaagacagaaattgttgaaggtaacattcctgatggctacatggcattagatatcggacctaaagcaattgctgacttcgaaaacgtccttaaagatgctaagactgttgtttggaacggccctatgggtgtgtttgaaatggacaactttgctaaagggacattggcaatcggcgaattcttaggtaacttatcaggcgctacaacaatcgtcggtggtggcgattcaacagccgcagttaagaaattaggcgttggcgacaagttaacccatatttctactggtggtggcgcatcacttgaatacctagaaggtaagacattacctggtatcgctgctatttcagacaaataatttaaaattaagaggagattttctcatgcgtaaaccaatcattgctggtaactggaaaatgaacatgaacccaactcaaacaactgagttcgtgaatgctatcaaagccaacttacctaagtttgatcaaacagaatcagttatcggtgcacctgctgttgacttacctgctttattagaagcagctaaaggcacagacttaaaagttgctgctgaaaactgttacttcgaagatgctggtgcattcactggcgaaacttcaccaaaaacattgaatgaaatgggtgttgattatgtcatcatcggtcattcagaacgtcgtgattacttccacgaaactgatgaagatatcaataaaaaagcacacgcaatcttcaaaaacaacatgacacctatcttctgttgtggcgaatcacttgaaacacgtgaagctggcaaagctgaagaatgggtttcaaaccaagtaacagaaggtcttaaaggcctttcagctgaccaagttagctcaatggtcattgcttacgaaccaatctgggcaatcggtactggtaaaactgcttctgctgaccaagcacaagaaatctgtgctgttgttcgtcaaacagttgctaagttatacgaccaaacagttgctgacaaagttcgtatccaatacggtggttcagttaaacctgcaaatgttaaagaaatcatgggcaaagaagacatcgacggtggtttagttggtggcgcaagtatggaacctgcttcattcttagacttagttcactttaacgactaatttttaacgcattcctgtttacgaatggcgtaaaattagctaaaatagatgtaggctttgcctgacatccaaaaaagcgctaatgcttagcattagccaaaaaaggagaaaattacatgtcaattattactgatattttaggtcgcgaagttttagactcacgtggcaatcctactgtcgaagttgaagtttacacagaagatggcggctttggtcgcgcaatcgttccttcaggtgcttcaactggtgaacatgaagctgttgaattacgtgacggcgacaaatcacgttttggtggcaaaggtgttttaaaagctgttgaaaacgttaatggtcctcttgcaaaagaaatcattggtttcgacgctacagatcaacgcggtatcgatgctgctatgattcaattagatggtacagaaaacaaaggtaaattaggcgctaacgcaatcttaggtatttcattagctgctgcacgtgctgctgctgacgaattaggcttaccattgtacgaatatcttggcggccctaacgctcacgtattaccaacaccaatgatgaacgttatcaacggtggtgctcactcagataacaaagttgatttccaagaattcatgattatgcctgttggtgctaaatctgtacgcgaagctatccgtatgggttcagaaactttccaagcattgaagagtcttttatcagctgacggtaaagttacttctgttggtgatgaaggtggtttcgcacctgacttcgcaaacaacgaagaacctttacaatacttgatcaaagctattgaaaaagctggttacaaaccaggcgaagatatttcaatcgctatcgacgttgcttcatcagaattatggaacaacgaagacaagacatacaaattacgttggtcaactggggaagaattcacaacacctgaattcgttaaataccttgaaggcttagttgctaaatacccaatcatttcaatcgaagatcctatcgatgaaaacaactgggaagactgggcatcaatcactaaagaacttggcgaaaaagttcaacttgttggtgatgacttcttcgtaacaaacactgattacctacgtaagggtatcaagatgggcgctgctaactcaattcttgttaaagttaaccaaatcggtacattaacagaatcattagaagcaatcgaaatggctaaagaagctggctacacagctgttgtttcacatcgttcaggtgaaactgaagatacaacaatcgctgacttagttgttgctacaaacgctggccaaatcaagacaggttcaatgagccgtactgatcgtttagctaagtacaaccaattaatgcgtattgaagaacaattaggcgatacagcttcatacaaaggtatcaactcattctacaatatcaaaaaataattgaatatgttcgtgtcggcacattttgaggtttaacagccggcgttaaaggattatgtttgtagtcttttgacttagggggttaccattgaatatggcgagcaaaacatatctagtaagagcatcttttaattaagatgctctttttttgtgcgataaattgaccggataaggtaatggattggattaggctagcaactaaataaacaatccccagcataaccggttgattaagaaaagcttatggagcattgcgcaataattaccagaataatcttgcaaataattacgtttgcaagcggatacataaacattagactatagatagcgtagagggattgaaacgaggagttgcgataagcatgaacaaacgagaacacgctattattcaatatagtttggcccagcataaaacgtactatgtcgacattgccgcacagttacagctttcagagcgcaccattgcaaccaccttgaatgatatcgaaagagccctttaatgtgaaactcgttcgaaaaccgaatgacggtatttattttaccggggatgtcgcgacattagccaatcatcttgaaaaaaaggccaatgatcgtccccaatccaaggaagaacgctgtcattgcattctggctaaattattattaggttcagcatcgattacgattcaacaactttctaataccctatacgtgagtcggagtacagtcgagaatgatttgaaaaaggtaaagcaaaaactcgcgcaattcggtcttcaattggcaatcacgcataccggtttatccttaatcggttctgagcatcaaaagcggcaagcaacggtggagttaatcagtcagtattggggaaaacggactgaggctaaagagttaaatggacagttagtgcgccatgttcaattaccggataatctgaatcaactgtttgaaccagccttgattaaaaacatactcacagctttaacggaattaattgaaaaaagtacgctatcatttactgattacgagtttcagttgttagcgattcatctgatgatgccagcaccaactggtggaagcaatggagcccaaccagtggtgacaccgttcattgccgaaacacagctgttagtacagattttagaacggcgatttgaattgacaattccggattttgaacaggaatatctcaaccgtcatttagtaacggtccaatcgaaggatacatctgttcaaactatccagaccgagttgcggcaatcagtcgggctgccacaactattacggcaacagcttgctcaattagcagttgatgaggaattaattcaggggttagcagttcatttaagttcggcacttcgccggcttgcaatgggattgagtattaataacccatatactgatgaaatttgccagaattttccgcaagcctttgatcaagcagtgttactaaagccggtgcttgaaaatcagtatcagattcaaatgaatgaggacgaattagcctttattagtttacactttgaagctttttttgaacgacattcagaagatgcacgcttgagtgttgtggtggtttgtagtagtggcattgggacatcgcaattattagggcaacggttggccaaaacgtttgctcaagaattacggattactcgtattattgccttgggagaactacttgcaaccccgattaaggaatcgctagtcatcagtacgattgcgattaaaggtttgtcagtgccggtgattgaagtcagtcctttgttaaatcggcatgatattggaatcattcgccagatgattactgaacaaccgacgcctaccaatcacttagtagctttattgcaacccgaactgacaattgtcacgcaagagcagttaacggatcaaggcgcaattgaattaattggtcagcggctcattgatcaagggtatgcaaagccaacggttgtccaggcagcgctggcccgagaagctttagcaagtacggcacttggtcgagtagctttgccgcatgcggattcacaattaattaccaagccagccattgggttgctgattgcaccccaaagtattaattggcaacacaacgacaaagtgcagctcgtcttctttatggccttgaacgaaactgttcatggccaaatgcgggcgatttatcatgatttagaccaattgattgaaaccccccgtcttttaaagcaagtcgcacaagcatctgatgggacggctgccctcgccatcttggcacaattgaatcagaaaaattagaatggagtgttaccagatgaaagaatttgatgttgaaaatatttttacagatatcgttgttggggatgataaaccgacggcattagcaacactagcgcaattatttgctgataagaatgggttagatcgggttgcattaaccgcgggattcaatgcgcgtgaagctgagagcacaactggttttgggaatggggtggcgattccacacgcgaaagtggcgggattaactcaaccagttgtcggaattgtcacgtttgaaactggtgttgattgggaagcattagatgacgcaccagttgaaatcgcgattgccctaattatgccgctcgatgaccctaataagacgcatttaaaagtgttgtcgaagtttgcgcgcaagttgatggatgacgcttttattcataatttgaagcaaaatcggcatgatgcaatggcactctacacgttagttaacgatgaaatcgaatttaactaggaggatttagaagatgaaaaagtttgttgggattacaaaatgtccagttgggattgcccatacttatatggcagctgaaaaactgcaaaaagccgggcaagctcgcggatatgaagttaagattgaaacacaaggcgcttcaggggtagaggatgaattaagcgccgcagatgtggctgatgccgatttcgtgattattgccgctgacgttgccgttgatggggaagaacggtttaatggcaagccagtactatatgcgaagaccgctgaagctattaaagattctgatacactgattgaaaaagcactaacggcaggtatttatggcaagaatcagccgaaaacagaagctaaacaagaggacagtcatgaacaaagtccaattattaagcaattattaaatggggtttcccatatgattccgtttgtcgttgtcggtgggttgtttattgccttgtcaatcgcgattggtgggcatccgactaaagcaggaatggtgattccaccacataccatttggagtagtatgaatcagattgggacgattggttttaccttaatgattccaattctcactggttatatcgcttatgctatttcggggcgtgcagctttagcacccgcaatgattggtgcaatggtcgccaacaatacagacatccttggtacaaaagccgggactggatttattggtgcgattatcgttggttttgcggctggttacttggttaaatggtttaattcatggcccgtaccaaaagatttacggccagtgatgccaatttttgtcattccgttattaggggttgggattatctcagccgttttaattctcgttttaggcgcacctatttcatggttgatgacggcactacaagatatgttaacgaccctttcacaaaatccagaaacgagtgtgattcttggcgttgtgattggtgcgatggtcgcgattgatatgggtggcccagttaataaagtggccttcttattcggggtggcatcgattacggctggacatccacaaatcatgggtgctgttgcttgtgccgttgctgttccaccattggcattggggattgcaacatttgttcgtcgcgatctttatacagaagaagaaaaatcagctgggattccagctatcttaatgggcttgattgggattactgaaggcgccattccatttgcaacagctaacccaaaacaagttttcccaagtatcattgctggttcagcagttgctagtgcagtcgggatggtcttcaaaatcaccgatgcagtgccacatggtggcccaatcgttggggtgttaggtgcaaccaataatattggtttgttcttcctctcaattttggcaggggttgctgttgcggtcgcaattttaaccacatttaaggtacgaaaagcacggaaagcttaatcttaaaagggcacacgagtaatcggcgctctttttttgtgggtaaaaaagttatgaacatgcgcttttttgaattatataaagcgctgtctatcgaattttgataaaaactggtataatagagccaattaaggtaaaaaggggtggcagtcgtgaaaaaaggagatcgccaagcacgaatcgaacaaatcattaatcagcaagttgtttcgacgcaagaggatttattagcaacgttgaaacaagatgggattgatgcaacgcaagcgaccatttcacgtgatattcgggagatgcaaatcgttaaggcacgggatgtgaacggtgagctccgctatacgatttttcacgatgacgaacgcacccaaactcagaaattaaaagataaactgcgtgaagtggctttgtccattacacaagtgcaaatgttaaacgtaattaagacgctcccaagtaacgggaatttattagcagccttaatcgatgatttggggtacccagaagttgtcgggacgctggcgggtcacgatacgattgttatcattagccctagtgaggaactagcagccgaattaaacgaacgtttcgcacaacatctagcaacagcgagataagcaaacaaataagacgttgcgacaaaagtaattttttgtcgcaacgccttattttgttgagctaaacatgttctgtgttaatcctcaggagatatccggctgataactcactctttaatctacatactggttaaaaatgtctgggatgggggctgttactgttctttgttcatccgtgaagggctctgtgtagcgcaacgtttgcccgtggagtagtaggcgctgtgttgaatcggttggaaagtacaacggatcacccaaaatgggatgaccatcagccgccaggtgcaagcgaatttgatgtgttcgccctgtttcgaggttgactgccaaggttgctgcaggtccttttcgatgcagtaattggtaatgggtcactgcggataaacctgtgatgtaatcaatcgtgcgtttgcgcttattgtatggatcgacaccaattgggaggttaatcgttgcatgttccaagagtgtttgttccggatcgttagcaatagcgatgtattggcgcgacattgttttttgactaagctgtcggtttaaaatgccgatgacgattggggttttaccaatcaagagcacgccactggttgcttgatcgatgcggtggaccatgtaggcctttttatcttgtttagcaagataggccgccacttggttcattagggtgaagttttcaccaggaccgttcggatgggttttaatccccgccggtttattgacgaccagtaaatcatcatcttcgtataaaacggaaaaagattgccgttcatcaagttcgtagtcttggaccttaacggaaacttctgagaagttcatcgtaatttgatcgccagcttcaacgtgtcggttgaaggcgagataatgtccgttgaccaaaatatcttgattaatccgcaagaaatgttgcattttttgcggcactaaccagtgattcagcaggccgcggacagacatcggactaaagtcgggcgctaaagtcacttttttttggtaaattatcattagagttcaaccacctttaagctattagtttagcgaaaattggtgtaaaagtaaattttaaaagattgttaatgtcttcgattggcatcagtgtcaattgacgaatatgctacaattaaacaagattaattttgaccgtaagaagagggatcgcatgaacaagcaagattcgccgttttggttggcgattaaacaatttatgaaacgcgtctggcgcgtgattcgttatgtctggtatcgactacaattgacgagatggctgattctcgctgttttaattctcattttcgcgatgagcagctggctcacgtttaaagcgaagacggctaacgtcggtgagattaaggccaacttacaaaccccaacggcgctttatgacattaaggatgaacgcgcggggacgttatattcgcaaaaagggacttatgtcgatcttgataagatatcgccgcagattcaaaatgctgttttgtcgactgaagatcggaccttttataccaatcatggattcagtattaaagggctagcacgagcagcagttgggttagtgattcatcatgggcagattaccggtggtgggagtacgattacccaacaactcgccaagaatgccaagttgagtcagaagcagacgttctcgcggaagtttgaggaattattcttagctgttcagattaccaaggtctattccaaacaggatatcttagcgatgtatttgaataatgcctacttcggtaacggggtgtggggcgttcaggatgcgtcaaaacggtattttggtaagaatgcgagtgaattagatgctagtgaaggcgccgtgattgcagcgatgttgcggagccctagtttctataatccggctgaccatttagataatgcgactgcgcggcggaacttaattctcggcttgatggtcgataataacaagttgacgcaagcacaagccgacgctgctaagaaagagcaacttgtcgtgacgaatacctacgagcagtcggatgggtatcgttatccgtattactttgatgaggttgtgaatgaagccattaaccgctttgggttgaaagaagaagacctcgttaagaacggatacaagatctatactgccctcgaccaatcccaacaaagtaagatggaaaccacctttaaacaaaattggttgttccctgataacgctgcggatgacaccttagttcaaggtagttcagttgcaattgatccgaaaaccggcggggtatcagccgtcgttggtggtcgtggtgagtatacaatccgtggttatagccgcattacacagatgaagcgtcaaccgggatcaaccatcaagccattggcggtttatacgccagccttagaagatggctaccactatgattcatcacttgaagataagaagcaaagctatgggactaaccactatataccaacgaacccggataacgtttataccggatcgatgccaatgtatcaggcgctagccaacagtacaaatgcgccggcggtttggttattaaatcaaatcggcctcaaacgcggcattaagtcggtcgaaaaattcggcatttcagtacccaagagtgaccaaaacttggcgatggctctaggtggttggcaaggtggggtttcaccttaccaaatggccagtgcttatacggcttttgcgaataacggtgaattgtctgaaacacattttattcggaagattgttgatgcgagtggcgccgtgattgttgataataccgaaccatccaagacacggattatgagccaaaaaacagccaaagaaatgactagcatgatgttgggcgtttataataatgggactgggcgttatgcgaaacccaacggctatcaagtcgcagggaagtctggtagtactgaagtgcctgatagttatggctttgggaccaaagatcaatggttagtcggttatacgccggatattgttgttgcgacttggatggggtatgacaagacggatcaagatcactttatgaagaacactagcattgacggtttagcaccaatctttaaatatgagatgcaacaactcttaccaaccacagcacagacggactttgatactgaagatgctcaatcgttggcgaaaaaagaacagagtgggacatcgaacgaattagtcgattcaattgaatcgggttttaaagatgggataaataaagcgaaagatacagccaatcaatggtataataatttgaaaggttttttcaattaaatacatggaaaaaggagtcagtacaatgacagttaatatttatgatgatgccaaccaaatggcaacgcacttgcaagaattaccacaatttttaggcttacaaaatgcctttgcagcattgaaaaaagacgatattgccttcacaatgtttaagaaattccaaacgcaacaaatgacacttcaacaaaaacaaatgcaaggtcaagaattaacggacgacgaaattaaagaaatccaagaacttgctcaaaaaattggggatatcgacgcaatcaagaacttgatggaacaagaacgtcaattaagccaaacaatggatgaattaaaccaaatcatctcaaaaccaatcgcagatatctaccaagcatagaatgcgtttgaaacgggtttggctttgaggattaacctaaaaatgagactgatggcgtattttgtcatcagtcttattttgtagttaactggaaaagtcagtttcaaaaagcacgtttcaaataagagtgtgactgattgcggtcagcaactgagcattaatacaaaaatcgcgttaatccaggttctaggattaacgcgatttttaaattaagcggaagttgttgcaaccagaagcacgtttcaaacggtgaatcgattgatttcgattcaccgcttttttattgcctaaaaacagaacgtttgttctaatcgcctttatcacaccgcgtggcaatggtataatgaagcttatctaagctggttacgaccggccaaaagaatggggtttttcaagatgaaatttatccatgcagctgacgcccatatcgacagtccgtttgtcggattaaaacaagcaccgacagcattgtgggaaacaatccatgcgtcaactttcacggcgtttaaaaaattaattcagacagccatcgatgaagccgtcgattttgtattattagttggtgattcatttgatcaagaagcgcagagtttgccagttcagaaatttttaaaacaacaatttgaacgtttggcagatgtcgacattccggtctatctgagttacgggaatcatgattactgggatgccaatcaagtgcattttgaattgcccgccaatgtccatgtttttggagcacaagtagagtcgtttgaactgactaccaaaggacatgagagtgtgaccattgtagggttcagttatgatcaacggtggttgtcagctgatcgagtggttgattttccacaacgtgccagcacaacttacacgattgggacgttgcacggtagtcaaaaagcaacggccgatacagatcactacgcaccatttacgattagtgaattgaacgcttgccattacgattattgggcattaggtcacattcataagcgccagattctccaagaacgaccagcgattgtttacccggggaacttacaagggcggcataagaatgaacctggtgaaaaaggcttttatttagtggataccaacgatggtcagttcgatttaacgttcaaaccaacgacggtcattgagtggcaacgtcaacagtttgaggtgacacctgacatgagcttaacgcaattgcaaacggctttgagtgcccaattgatgcaaagtgatcacgctagtttagtggcgctagagctaacacacgcggagcgattatcgagtgacttattgcaacggattaataatggtgaattattggcggtgttacaagaccaattggaaaatagtgaaccactgcattggccatacgcgttgaagttgcggtttgcagcacaacagcaatttagtcagattgaccaagcctactgggaacaagcggctgcagctatcttgacaccggacaatattctggaaaaagcaaagccgttaatgaaggaaaactttatccgggaagcaattgaaacaccagaatttcaagcggatctcaaggacttagtcacgacaattctacaagagaagaagatgggggattagccatgcgaattaagacagtcaccattttgggcttcggtaagtggcatgatcagacgattgatttgaataccgactatcaagtcctttatggtcaaaacgaggcgggtaagacaacccttacagcctttattaaaggcgtgttattcggctttgcgaccgctaaacaacggtatgaacaatatgtgcccaaaaacggcgcacaatacggtggtgaattactggttagctatcatgatcgcgatattgtgattcggcggctttccggtaagtttgggggcgacgtaacggtcatcgatcaaggccaagaatttggcgctgattacttagctgacctcttggcaccagcggatgaagctttgtttacgcagatttttgaaacgaaccaacaggatttaaatcagatatttaatctaaaacaggctgattttttgcagcatttattgacgattggtgcggtggggagtcatgagtggctcgactttgccaaggaactggataaggacagtcagaaaattttcaaaccctctgggcgtaagtggccattgaatgttgctttgaagaattatccagagttagtgcaatccgttaacgaagctagtcgtggttatcaagaatatgaaacgaacgcacgtctattgcagagtaccgttgcgacaatgacggaacaccaaaagcaagtggctgaattaaaacaacgccaagcgcagttgcaacatttgcttgatcgttggccaagttatgcggaatggcaagcacttcaaactaaacttgaaaaggcaacgccgtttgacttaacgattgacgaacaataccaagcattagtggtcgaacgagaacgcaatgcaaaggcgttagcagaagcaaaatccgaggtagcaactgttcaagaaacattggatcaaacaggtgaatttcgattttatcaagctaatcaagagacgttggtgccattgtttgaacaattaaatgaacagcaaaaacaaattcaattacttggattacggcaaaaccaaagcgcacaactcgctagcgaaaaagcccaattagcagcgcagtatcaatggcaaacggatcaactaccaaatcctttgacagatgagcaacgcgcacaactagaacaagccgaagctgaaatgaatggggcaaccacgaccagtcaagtgctgaccaagcaactggctgatttagaggcgcaattagccacgcaaaacgcggcagttagtcaggttgaaccacaagaaacgccaacgactgatggacgtgccagtcaattgagtatgctgattggcgtagtcatattcatgattggtcttttcttgccgggcgctctgaaagtcattgcggtcgttggactagccgcacttggctatggtggttacatgatgtggcaaaataaacaatctgaccatgaccaaccagtgcaaaaacaagcttggcaacaagcgctcgctaagttggatgtgttgcaggctgaaaagcaaaccaagacagctgccttacaagcacaacaagcaatattgcagacgatgcacgaacaaagcgcggtattattggcgcaaactggctacgaaacggcgatgccaatcagtcaagttttagcgatgcagcatgctttaagccggatgactcaattgaccatggcgctcaaacaacaacaagccgaaaatcaagcaatcgaagcggcactaaatatgtattgggatgcgtttgcttttgcccgtgattgggtgggggcgttacagggcagtcatgaagagaacttgtcccaggtgagccaattcaaagcccggattacccaactcacacaagaccttgcacaaagcagcgagagttaccggtattatcaacaacaagtgacacgcttaacagacacgattaaagaacaagacgctgcacaaacagcattgctagcaaaggctaacttaacaaccgccgcagaattagccagttgtgttgccaatgagcaacagcgccgtgctaatgaacaacgtcaagctgatttaaaacgcgaattggcaacggacttgtcggctttacaagcaatcgctagtcaagaacagcttaagcaacaagccgctcaaattacagaacaagtggcaagtttgacaagtcagttacaagaacagcaacaagctgttgcgcaactacgcgtgacgcaagcgcaacttgtcgataatgacagttatcaacaacagcgacagcgacaattacaagaacaggctaagattactgatttagcccaagagtggctcgctaagcagttagcaattgattggattcaagcgacgctgaaggccgcttcacaagaacggttcccccgtttattggaaaaggcaacgcagtattttgcaattctaacccagaatcggtatattaagattaacttcgatgacacactgatgacggttttacgggcggatcaagtgctttttgaagtcggtgaattatcacaggggactgcagagcagttatacattgcgctacgctttgcgtttgcagaagaggtagctgacgtagtctcattacctttattggtggatgatggattcgtcaactttgatgatcaacgccaaatcgccgtttggacattactccaacgactcagtgcggccaaccaagtgatttatttaacggccaatccgcggacgcaagcacactttgaagcggatcattggttaaatctagaggaagtggggctgacacatgacagcaaagaaattatttgattaccaaaacgacgagaatctggatttatttgtactaattaaaacggcggacgtgcggattgctaaaaacggcaagcaattcatcgcgtttacgttccaagatcaatcgggacaaatcggcggtaaatactgggatgcttctgatgaagacgttgctaaatttacggcgggtcaggtgatccatttacaaggtaagcgggaattataccaaaataatccgcaagttaagatttataaactgcgcttaacgacgggggacgaaccgcaaacagttgaccagtttattcctaaagcaccggtgcaagtaaccgagatgcaagacgaatttggcgcgatgttattcgaaattacaaacccaaattggcaacgtttggttcgacatttaatgcaaaaacatcaagcggaattcttcagttttccagcggctaagaccaaccaccacgcgtttagtggcggcttggcctatcatacactttcaatgttgcgcttagctaagacgattgctgcccaatatccacaaattgatgaggcattgctatatgctggtgttatcttgcatgatttaggtaagacgctagaattgtccggtcctatttcaacggaatacacggttcgtggcaatttgatcggtcatattgtactggttgatgaagagatagtgcgggcttgtgatacattaaagatcgacgtgaatgctgaggatatgttgctattgcggcatgttatcttggcccatcatggtttaatggaatatggttcacctgtccggccacaagttcttgaagcagaagttctgcatcaaattgatgaattagatgcaagtatcacgatgatgacccagtcattacaacatgcggaagcaggtcagtttactgaacggctcttcgcaatggatgggcggcgtttctatcgcccagtcgaagatcctaatttagatcaaccaacagaataaatgtacaaaaagacccccgctgctgtcgcagcgggggtctttttgttaatgcttatttagatgatgattttgaagctttgctgttaacgccgtagcttgaaaggatgtctgataaatctttgtccttgatagatacgttagcgttcttaagtaccttagtgatgactttgttcatcactgtttggtctttaagccatgaagcgtaaacgatgtctgttaattctttcttgtgatcagccatcttacctttaccagggttcttgatcatccggataacgtggtaaccataagttgtcttaacaggggttgttgtatattcgtttgtctttaatttgaaagcagcagtcttgaatgttgagtcaagtgatgtatcagtactatcgaagacaggtaatttaccgccatctttcttcgtaccagtatcagttgaatatttcttagctaattcgttgaagttctttgttgagttgtcttttgcaagtgcatcaatgacttcttgagctgtttctttcttttcaactaagatatgttgaacttggacttttggttcgtatgatttccattgtttcttcaagtcagcattggttacttttttgttatcttttagtgctgcttgtgttaagtattgtgttttgatgctgttcttaaatgatgtaggtgtcatactgctttgtgcaagcacagagttgaatgatgaaccgtattgttttttgtaaccatcataagttttcttaacttttttatcgatggcttttgagccgtattggttttcaagcgctttttgcaagatcatttgttgcaattgttgcttgccggcagatgtttccttgatttctttatagtattcgtcttgagtgattttaccaccctttaggcttgcgatagtcttgctaccacaacctgctagtgaaactaccattaataaactggcagcggctaatagccatttcttcattgtatgacacatccttatcaaagtatttatgaataaattcgtagtgaattcaccaattaatataacacataaactaactaaattgaacgaagcgtctaaaacttcacagaactttcaaatttaggttttacgctaaaaacgcgggaatcgttgatatgcttaaccttatcgcttgcatacaatctaatttttggtgaatttatttttttaagttttgtgtcaaacgatcaactgattcttcgatttgagcaattcgtggtgctgcttcaaatgaaaatgtttgcaatgcatcactgataccaccaagtgatgtaactgcagttgttttgagttcgtttgataaattttgcgaagctgtttgcaattgaacagcactttgttgaacatcagttgaactttctgagagctcgtttaaatagcgggcaatcgcttgttgtcgtttggggccggttgtagaagcggtgagaagggcataagccgtccctaataagccaccaactagtaatccttctgaaaatgacatgattagtcctccaattgtgcgtgaataccatctgcgatcgcttgtagttggtcagcagtgtaatcagcgctattatcaccgaattgcattgcaaatgaatcatccgctgtgtaacgtggaataagatgaatatgagaatgaaaaacggattgataagccaccgcaccgttattattgcagatgttcattccttggatggctggattgctagctttaatagccttagcaatctttggaatgcgactgaaaacggccgcagctaaatcagcatcgtattcaaagatgtccgccacgtgtttttttggtaccaacaaggtatggccgggtgtcacttgtgtgatgtccaagaaggctttgacatcgtcgtcttcatagaccactgtgttcggaatttcatttcgaacgattttgcaaaagatacaatcatccattaattatgcctactttctcttatttgaagtctcaatacagcttaatgctatcataaacaagggcttttcgctactgccatcagctttgtaagcggatggaaaaatattgagtgggggcatacactcgcagtttacttcgtgttaagatatgatatgaaaaaggattcactaaaaaagtagttttaaaaaccaaaaaacgaggctattgattatgagtttagagattaaccaattaacggggggctacgcgcacgtccccgttttaaaagaggtcagctttactgtgccaaacaatcaagtggttggtttaatcggtttaaatggggccggcaaatcaacaactattaaacacatcattggattattgacaccacaaaaaggcacaattactttagacggtgtgacgttacagtcgaatcctgaccaataccgccaaaaagtagcctatgtgccagaaacgcctgtcttataccctgaattgactttaaaggagcatttagaattaacaatgatggcttatgatttaaacgttgaagagacgtgggttaaagccaatgcattgttaaaacgattccgattagacaataagttagactggttcccggttcacttttcaaaagggatgcggcaaaaagtaatgatcgtcaatgcatttatgacaaatgctgacttgtttatcatcgatgaaccttttactggattggatccattggcaattcatgatttattagaaatcattgctgaaaaaaaagcacaaggagctgcaattctaatgtcgacccatattctcgcaacggcgcaacaatatgctgattcatttgtgcttttaaatcagggtcgcgtacgaacgactggcacgcttgaagaattaaaggttgaatttaacatggctgacgccgatctcgacgatatttatctgcagatgacgaaagaaggttaaccatgcaagcattatggcaaaaacgcgtgcaaaaacatattcaagaacaagtgaagtatttgcgcctcgttttcaatgatcatttcgtgattgcgattatctttttattaggagcgttgggctacacatatgctaacgccgtcaaaggactggatccacaagcttggtggctaaaacctgtattgagtttagtattacttgcggcagttagttttggtcgcctagcaacattattaaaagaagcggatagtgtcttcttattgccaaaagaaagcggccttgtgacgtatttgaaatcagcacgtttatatagtagctggttaccattaattgcaatggcttttgtgacgcttctagtggcgccactcttgttaattactaagacggtcccggcatggcacatagccgttgccttgattacattggtaatcatcaaagaccgccgcttttcaatccagttgcgtcagtggtaccaagcggatgaaacccaggcaacaaaagggctttcgttaatcctcgatttggcaataattgccagtcaattatatcagtggctaaatttagtcggagtgcttgtagcgcttggactagcctattatcagcgacaacaattggcgcgtgttcaaaagacacagctattcgattggttagcggcagttggtgcagaagattcacgaatgggacgaatttaccgcctctataacctcttcacggatgtgccagggctcagtagtcaggttaagcgtcgtcgctatttagatggcttattaaagccaattatagctaaaccagccaatacttacctctatttatatgcgcgtggctttttgcggggcacagaattcagcgggttatatatccggttagttgttttagggggcatcattctgtgcttcagtcacatatggtggttgagtttggcactcggacttctattgatttatctagttggttttcaattattaccgttttacaatcagtatgatcaaattattttcactcatctatacccagtaccaacgaccaaacgaattcaagcgttcagccaattaatgcggactttattattgcttcaggcgttactctttagtgtcattttattagtgacactagggatgacgattcaagttggtttaagtgttttagcattgttcgtgctcgtgattggctttgttcaattctatttgcctaaacggttgggggcatagtccctgtgacacgcatgctttcctacttgacgactactggctaattattatatgatacccttagttattagacagttgaagcaacgtgagcgctgtattttggcgctttattttattgaagaggagtcgaggctgatgaattttgacctggatactggctggcaagttcgtccggccggtggtgatacgggcgctgcatttttaggcgttcgcgcgtcagaaaagattttcctaaagcgcaacacatcaccatttttagcggcgctctcggcagaaggcataacaccacgcttaatctggacgaagcggatttcgagtggggatgtcttaaccgcacaagagtggctcaacggccgaaccttgaaacgtgatgagatgaatagcccacaagtcgctaagttattagcacgggtgcatcaatcccaactattgaaacgaatgttacaaaaagttggcggtcgtgtctggtcagcaaacgaaatgttgcaagcctatttttacgacttaccgcaagatttacggcaacacccatttttagaacaaacagctgattatttgaagcaaacgttacgtcaattacaagcaccttctgcagaggtgtgccatggcgatttaagccataagaattggttgttatcggatattaatcgactctacttagtggattgggactcggcaatgttagccgaccctgcagtcgatttcggaatgattttatttcaatatgttccacgtcaagaatggcacgagtggcttgagaactacggcctagaggtgacgcctgaattaatgatgcgcgtcaactggtacggcagtttgaacctactccaaagcattaagcaccattatcaacgtggtcgttttactgaaatgaaccgtgacatattgcgcttagaagcagtgatttctgaaataattaataaaaattaaatgccaaaggttgggcaagtgtccaacctttttgattggcatcaacaaggagaacataatgcgtttaagaaataaaccttgggcggcggacttaattgcggccaaccccagcatgattttagtgagtccggaagatatcgccggcaagtggcaaacacgttttgccaaagaacaacccatttacatcgaagtgggttcaggtaagggccaatttatcactcagatggcacaaaaatatccagaccggaactttatcgcagttgaaatccaagaatcagcgattgccgtcattttacaaaaacaagttgaattgaaattgccaaatctccaattattattgggtaacggcgcagccttaacaactttctttgctgaaaacgaagtggcaggggtgtacttaaacttctctgatccatggcctaagacgcgccatgaaaagcgccgattgacatataagtcattcttagcggaataccaacaaattatgcaaccaacgggctacttacgtttcaagactgataaccaaggtctattcgaatactcattgatgagcctgaatgattatgggatggtttttgacgacatctcactcgatttacacaatagtgaacttgcagaagacaacatccaaacggaatacgaagaaaaattcagcaagcgcggccaagtgatttacagattagaggcacactacaagtagagtgctttcaaagctggtcagcacccgagcaatagcctagtctggtgaataaccaatgcaattggttgtttgccggacgtagctatgcacagggtgctagctttgaaagcacgttttagataagagtgcacttgacgctcggtcagattttgagcattaacataggctggcgaatgagtgatataatcgctaatttgacaggtgtagttaggcgcagaaatctagcgtcaatagcacgtttcagcaagagtgtttttatcacacgggttgcctttgaggattagcctaagaaagggattgatgggggttctttaccatcgattcctttctgtagctaaccggaaaagacagtgtgataaagcacgtttcaactcaaaaaggtacgttatccagattttatctaggatagcgtacctttttaattataatattggttgaaacgtgctccgcgcggtatgttcctgcggttagcaacgtcagtcaagcgaccaataaattggtcactcgtctgactaagctaatcctcagaacgtgcccaccgcgctgcgcactctaaatttgtgagaattcaatcacgacgccggttcttgcgtctaccttgaatcgaaattggtttgtaccatcttcacgctcgcagatgatgccaccttgatagactggaaaggtccgtttgttttgtgagaataagtggggactttcttcaatccaagaacccacaatctggccttcatgttttaagccggctttaacatcttctaaaatttggtttaatttgatcattctttgttgcgcccgatattgcttcgcactggcagccgccgccagcgcaaaaccgatgccggttaataaatatttaaacgtttgcccattttttttcaaagaaaaactcctcagtcgtttttgtctttaaatagtatagcataatttttggtcctaaggagtggacatttacggacaaaccgcttatattaaaacgagtagtaaaattgaaggggtgcataatgaaagaattagcagcgatgacagatacgaatctgactcatctgattactgaagggaaacatgttttattttttacagcaacttggtgtagtgattgccggtttattaaaccagccatgccagaaattgaagctgaattcccggaatacgactttattgaaatcgatcgggaccaatttatcgatatttgtgaagaatgggaaatctttgggattcctagctttgttgtgattgataacggtaaagaaatcggccgttttgtcaataaagatcggaaaacaaaacgcgaaattactggatttattcactcattgaactaaccttgaaggagtcattaaatgttaattgcaagtatgaaccaagcggcttttcccaacatcttagtggtaatgacccaacctgatgttgaaaagcaagtgacaactgaaaaacaatcaatcgtacggattagtgatcaggcagatcaaaccatcggctataatttcttagcggtgaatgagttattgcccgatttacaattcaacggtgttcaaacactaactgaacagcaagttgctgttttaaatgaagcacttgtagcagctggtttcaccggtgatttagtggctgatgaaacaccacacattgtcgttggttatgtccaagaatgtgatgtgcatcctgattcagaccatatgcacgttactcaaacacagattgcacctgatcaaaccgttcaaatcgtttgtggcgctgctaatatcgcacaaggacaaaaagtgattgtggcgacggtgggcgctgtcatgccagaaggtaaaattatctggcctggtcaactccgcggtgttcaaagtgacggcatgatctgtgcagcccgtgaaatcggggttgctggtgctcctgctaaagggattatggtcttgccagatgattgggaagtcggtcgtgaagtgacagcagatgcagtcgcagccctactaaaataatccatcttacgattttgttatgggattattaaaattaaaatagtatgataatagatagcaattaattggttaaagataaaccttttaattgttatttcgttttgcagtcaattaagcagtaaaacacaaaagaggggttaaacatatgtgtgggattgtcggatttgctggtggattatttgatttaccaaagaaaaaagaagtattgaaccaacaaatggacgtcattaaacaccgtggaccaagtggtgatggtgattttatcgatgataaagtcgcattaggctttcggcgtttatcaatcattgatttagcaaagggtgatcaacccatttataatgaagaccacactaagctagtctttttcaatggtgaaatttataattatcgtgaaatgcggactgaattgatcgcacttggtcacgactttaaaacagattcagatactgaaaccattttgcatgcttacgaagaatggggtaaagaggttgttacaaaattgcgtgggatgtttgtctttgtcatctatgacttacaaactaagcaattatttggtgctcgtgatttcttcggcattaagcccctttattacacgactttagcagatgggactttcatgttcagtagtgaaattaaaactttcatgcgccatccagaatttaaaccagaactaaataagacagccttaaaatcattcatgatgaatcaatacaatgatttacaagaaacgttcttcaagggtgttttcagattcccagcaggccattatttcacttatcaagatggccaattggacatcgaaaaatattgggatatgtcatttaatccttcaaacttatctttcgaagaagaagtggctaagattgatgctgcagttgaagaatccgttaaagcccataatgtggctgacgtaccagttggggctttcttatcagaaggggtcgacagtagttatgtcacaagtattttgcaaccgcaagaagtcttcagtgttgggtttgatgatcaaacctataatgaagtcacagcagcccgggcgcttgccgatgaattaggcttgaacttcaatgaaaccaaagtgaatgccgatgatgcgtttgctgaatttgacaaaatccaatattacttggacgaaccagatgggaacccatcatgtgtgccattatggttcttgtcacgctttgcccgtgaaaaagtaacggttgccttatctggtgaaggggccgacgaattattcgctggctatgtcaactacggcatgcactcccacaattcaacaattaaggccttcacttctggcttgaagaaattacctaagggtgcgcgtgccagtttagccaaagccgttaagaagatgccagccttcccaggtcgcgtccatttatacacgaatttggcgaacccgcgtgaattctatacgggtcaatctgtgatttttgatatcgaaaatccaagtatttttggggcagatgaagccaatactttcttgaaacctgcttatcaaaatgatggaacgattcaagcaaactatcaagctgattttgataacgttgcggatgctgatccagtctcacaaatgcaatatatcgacttacatcacttcatgttaaacgatattttgcaaaaggctgataagatttcaatggcgcacagcttagaattacgcgtgccgttcctggatcctaaggtggctaaggccgctggtgaagtcccaactaaatacttaattaatagtcatgatacgaaatacgcttatcgtcaagcttctgctaaacatttgccaacagcttgggccaaccgtcctaagttaggtttcccagtgccaattaagcaatggttagaagatgacaagtattatgaaaaagtcaaagcactctttagcgaagatttcgttgcagaattctttgatcaagataagttattggccttgttagatgccaataaagaacaacgcattaacggccgtcggaagatctggaccatctttaccttcttaacatggtataaagtctacttccaaaatgtcgaagattatttagcattaggctagagtgtgacctatagaatccgtttaagtgcagccacaaaattaatttttgtggctgctttttttgcgttttagagatcaatcaattgataacagagaaaaataaacattcattatttagctcaaacccgcattatggtaaactataagggattagtttaatcatatagataattgtgatttattgaaaagaggacgtttaaaagatgataacaaatgacacagtttaccattttgttgggattaaaggttcaggaatgagtgctcttgcacttgttttaaacgacctaggctatcaagtacaaggctcagatatcgatcaatatacgtttacacaacgcgatttagaacgagcaggaattaaaattctgccattctcagaaactaatttacacgaaggcttaacggtgattgccgggaatgctttccaagatgaccaaattgaaattaaaacggcccttgaaatgggcttgccagtcgttcgttatcaccaattcttaggtgaattattgaaaggctatacaagtatcggcgtggccggtgcgcatggtaaaacaagtacgagtggcttattagctcacgttttaagtggtgtggctaagacgagttacttagtcggtgacgggacaggtaaagggattaaagatgcgcaattcttcgcatttgaagcggatgaatatcgccgtcatttcctagcttattcaccagattatttaatcatgacgaatatcgactttgatcaccctgattattacacaggcttagatgatgtgtttgacgcgttccaatcagaagcttacaaagttcaaaaagggatttttgcttggggtgatgatcctgaattacggaaaatcaaagctaatgtgcccgtttattattatgggacacgcgaagacgatgacttccaagcccgcaacatccaacggacggtgcaaggttcagaattcgatgcttactatcatggcgaaaacatcggccattaccacgtcccactttacggtgaacacaatgtcttaaacagtttagccgtaattgctgtcagtcatttagaaaaaattgatggcaaagaagtggcacgcgaattggcagacttcaagggtgttaaacgccgctttacagaaaagaaagttgctgacgtgacaatcattgatgattatgcgcaccatccatcagaaattaaagccacattggatgcagcacggcaaaaatatccagacaaacaaattgtagcggttttccaaccccatacgttcacacggacaattgcgttaatggatgattttgccgctagcttaaaccttgcggatgaagtcttcttaacggatatctttagttcagtgcgtgaaaaagcagggaaggtttcaagtgctgacttaggtgcgaaaatcactaaaggtggccgcgtcttgaaattagacaatatgtcaccgctcttagacttcgaccaaccagtcgttgtcttcatgggcgctggtgatgtgcaaaaatacgaatatgcttacgaagaattattgagtaatttaagtcctaaagataattaagatttaggcattttgattgtctttctggatggatttgttacaatattcctaatcgggtgattatgggcccgtttagaaatataagaggtgaatattcatggaagaaagacgcgttgtgaatgtcgacagcgaagcccgctttttcagtaaagtgtatggtttgatggctgtcggtgtcggaatttcagcactgattgctgttttaatggtgactgtgtttaaagcacaaacttacacaatcctatcaagtggtagctcgtggatggtttggggcttgatgattgcagaattaattttagtcgttcagattagtcggcgttcaatgaagaatccaacggcctcgttagccatgtttgtggcatatgcggcgttgaacggattgacgtttacggccgttttactggtgtataacattggtgaaattggggcagctttcgcatcaagtgctttagtgttcattgccatgtcgatttatggtcgcatgacaaagaataacttaagcggctttggcaagtttgcaatgatggggttaatcggtgtgattattgtctcattggttaacttcttcatggcatcagctgcaattagctacttcttgtcatacgctatgttaattatttttatcattttaacagcatgggacaatcaaaagttaagtatgatgtaccgtcaatacggcgcaactggtgaaatttcggtttctggtttagctgttatgggcgcattaaccttgtacttagactttgttaacttattcctcacaatgctccaaatttttggcggcggcagagattaagggtttgataacagtcgggatatgactgttatcaaacgtttcaaaagaacggtcatcaggtaaaactgatgggcgttctttttttatgcttgacacaatactatgcataatatagtattaactttcgaaagggtgatcggtttgaatccacaattaaagaaaggcctcttggaattttgtgtgttagcaacgcttaagaaagaggattcatatggctaccaaattatcaaagatacatcgagtgtcgttgaaatttcggactcaacattatacccaatcttgaaacggctcgaggcgcagggtgaaattgaaagttatcgggtcgaacataatggacgcttgcgtaaatatttccatttaacattggcgggacaagcatcgattgatagttttttggccgattggccggcagtgatgggcatttatacttacataagggagtgtaacaatgactaagaatcaatttattaaacagcttgcggcagaattaacgcggtatgggattagtgatgcagccaacacgattgattattacgatgaattaatcgatgatcgactggaagcgggtgaaacggaagcggagattatcgcgagtttagcaacgccagctcagattgtagcgcaattagctacaccagataaaccggttcgccaaaagaagatggcaccgatgttgattattttaatcagtatcttgttagttttagggtcaccgttatggggcacgttgttattgaccgccatcatattagtggcacttggttatttcttgatttggttaggcccgtttctgggggcaatctttgctgctgccggcattcttggtgggagtgtcagcttagttttatcgttctttgttggcttacaagaaggctggataattgcggtgatgcagcttggaattagttttgtgatggttggtgtggggctgatttgtgcaggggcgacctggtacatgacgaaatacttaattcgtttctcggttggaatcacacgctggctagttgggatgttccgtagtcgattaaaggtggtggcgtagatgttgaaaaattggttgaagattagtttatgtatgattcttgtgggaattattttaatgaccgttagttttgggatggcgggttttaaaagccaaccattccaatatcgtggcacacatgaatggagccggacgtttaacttttaagataaataaaaagaggtgccgatgatgataatcgacacctcttttgttcgttattgaccgttccatggataatcggtactgatattttgattgaaatgtttttgactttgaaaatttgcgagacggtgggcttttcgttcctcataaccggcacagatgaaccgttcttccggtgattcgggttgaatgttaggaagggccggacctttttccattgtgacaaaggttaagaaggcagttagcccgaggaatcgttcgccggtcttgagatgttcaccgataatcttagtaaagatttcaatggaacgggtgccgacaccggcaacgtaactttcgatgcacaaggaatcttgcattttgaatggttcaatgaagttcagttggtcgatgctggcggtgacggtttcgacgcgcgctaagcggctagctgaaatggacgccgaaccatccaagagttcaagcaagcgtccgccatagaccgtttcatgttcgttcaaatcattgacgaagacgcgatggttactgatggagagggtttgacgacaggtgatgagatttgacattataaaaagactccttattaatcatttagatgggggacaatcagttggctagcagccaagtcgacttggtaaacgaatgcttgctcttcacgaatcgtcattcccatatcagtcgcgtagactaatagaccgagttgatgtcccgctgttaaatcataatgggtgggttgtaggtcgagcgtgatatcatagaattcgtttggggtgacggcgtcggtttgataactattgtggcgattttggagattgatgtgtcctttagtgatgacttgataattgcttggtcgattgagcttaaattcctttaaatcatcatagcgccactgatagccgagttgttggcctttagcagctaatacagcaggtgtggtgcctaaacggttgaattgaccatagtcaataaccagcacgctcaatagcccacgttcggcattgacagcgacccttgttctaaactgaattcgaccatcaataatgagcggttcggtaagcggggagcctaagaaacgcaaccggttgccagtgaaacttgattgatctgcgattaaggcatcttgccaagcggctgtactgattttttgggctctaaaggccgcaacaccgtcatctttaaaagtcgtcagtggggcattttcggtagcattagtgcttaatgtttgttcgtttagccagaaagtcgtagttggattgtcgagggctagccaatccgcctgggtcgtccaagtggcttcttgtgcgttgtcttgaattgtaacagccggtaattttgtgacagcctgattctcaacgccgagtaattgatgcgtgaaccataagttcatcatatcggtgaaatcgatcgactgaatgttattcatatagatatgttcaccttggtgtaagaaaagcttcttattaaccggttgatcgcgcaataaatcccacaaggcgccggcattttgtagtttaacgttccaatcatttaatccgtggactaagatgacatcgcaattcaggttggcgagattgtcacgatagttacgggctgcccagaaggcgttgtaattgcctgtgatgcgatcttgaccttcttgcagggctttgagttggtcggcgaagaaagtgccagagagcgcatgatcagcggcatctttttggcgggtttggcacaacttcgctaagacatcggcatcttcaccctgacaatcaattggggcgaccactaagccattttcgcggtagtaatcgtaccaactggaaatggcggcttcagctacaatggttctcagaccttcaacgccagttgttgcagcagcagtggctaaagtaccaaggtaggatttaccagtcattgcaacttggtgattacaccaccaagctttaatttcaatgccatcggtgcggttggtgaaagctcgtcgattaccggctaaccactcgatgatagccgtggttgaagctgtttcttcaggtgagccacaagtccggacgccgtcggaaccgcgtgtgccaatgccgccagcgtaaacgttcgcaaatccgcgcgccagaaagtaatcatttaaactgtaattgctgtcatctgttgcgtttaattcagttgtcatacttgtgccattaacggcgcgaggttgaggaagcggtgcagtggttggcgtttgggttaaatcagctaagtttggttgttgaacgggtttagtcgcaattgtagtatcaacattgtgcaaatcagcatcgacgtcgttaatccccttatagtaaggactggcagtgtagagtgccggaatttttaagcccgcttcagtttcgcgtggtctgaagatagtcgtttctaataagtcgcgttggccgtcttgatcagtatctaggctcgattcaacataaacgacttctcgaattaaatggctggtatcgaaaacgggttgtaccttaccattgaagatgagaaattggggctgatcactttgccagtctgcaaaaaaaccacggttagccaattgatccagataaagtaacccagtttggctacgcgtcgttaataggagataaagggcttcgatgaaagcggtctgatcaaatgccgcttgatcgataaatgggagttttgtggcggtcataaaagcagtgggttgatcaagttcaaaatcggttgtcatttcaaaacccaagagttggagggcgacattatagaagacaacttgatcgaatgaagtatcaatggtttcaaggtaggcggttagatttaattcggttgtggcttgtaataaactaagttgcccgctctgggttgattgactatgtgcttctgggaacagccgttgaaaaatatcttgggcaaggacttggaaggggagctgggtgaaatcctttgggagtaaatgaatgcgctgtaattccgtgatttgttcagattgagatttagttaagcgtgcaaactgatttaattgcatgtttttccctcatttctgcgaattttaattgacagtgactacttcaattgcttataatatagcatgttatgcggtattctgacagcaaaaaccgtcaatcaatgaggtcatagtagctcagctggatagagcaacggtcttctaaaccgtaggtcgcgagttcgaatctcgcctgtgacattcaataattcttggagacatctaatttcgcacattgcttgcgaggttaggtgtttttttaatgatggagtgaatgtaaaatgcaagattatttaaaagcgcatcaaacatggttagttgatttttatcaacaacggaattggtatcgattttcaccattaattcggttgaacttcttgagtgaagaacttggggaattatcacgggccgttagaacgattgaacttgggcgtgatcacccaggtgaaaaagttaaaaacgacgctgaaaagcgagctaacttaaaagaggagttagccgattgcttcgatcaactgctcattatctgttcgaaatatgaaattgagcctgaggaattgatggcacttagcgaggcaaagtttacaaaacggttcgaaaatgattagaaattaaatatttaaataaaaagtttatgcgctttaaagcctattttaatagccttttgcgaatgaattgcgagcgatttagtcgatagttttgggatgcgggttgctaattagaaaatgccatgctatactgttcaagtaatcaaattttgaaacgtaatttgagttttggatgcacaataccttcctcttttacctatcaataatttattgcaacaaaaaacgtacattgatatgtatcaggaggaaattattatgaacaacggcacagtaaaatggtttaacgcagacaaaggttttggttttatcactggtgaagacggcaaagacgtatttgctcacttctcagctatccaaggtgacggttacaagtcattagacgaaggccaagcagtatcatttgatgttgaagacagcgaccgcggtcctcaagcaacaaacatcgttaaactttaatatttgtgccccgcatctgcggggtttttttatacaatcaattcaatcaaataagcaaggacctgagacaaaaactgtctcaggtccttttttagtttagtggaaaataatattctcatgttgccactaatgataagcgattttatagtctcaattactctgttaaatactgtaacaaatgcttttcggcattatcatagttgtattgccgagcattgagtaacaccaagttgcgatcattatcaaaaaaattaccggtgctctgcgttagatcgggatggagtgctaagtattttccaactggcacttcagtatgcagcaatgtttgggaataatgcggtagctcatcggtgacattccctgggaaaaatgaattgaccgtaatctctttttcagccagaagataactgagaaagagggttaataaagctttatgggttaataaccaccttgcacgttgtaaagtagtctcctgttcttcgcaaatgctgagttgttgaatgatttgcggatcaccggttatgataaggacgcgaccgccagttaatcggtctgctaagcccattgttagctgataatgggggactaaattagccttaatattttcttctgtgagctggggaaaacaccggcagtgtgcactagaacgtgtattttatccactttatatttgatgcttgccagtgcttggttgcgtcctgatttggtcgctaaatcggcttggataaaaaaggccgcttttccaagttgggccacagaagcccggccttttgccgcattctgtccgatgataatgacttgatggccttctgcaatgagatctttggcaatgcgatagccaatcccagatgttccaccggttatgacaatatccatatgtgacagtcctttctttttcaaattattatttaagttgattgatttagaaatgagtgcatgagatagctattaagtgctttcgttaattaacttagggtcagtatatattaggctttttagagataccaattctttaactcgaattcgtgcaccatcgacggtactatagctattaacgatatgtcttttgtttaggcagttaaattgtcaaggtcctattgggttcagtatgatgaacatatagttaggattcgcattcatttcattaataggagggtgttgctaaatgattacaacgtataagaaaattttagtcggggtcgatggatctgacttagcgaacaaggcatttatggaagctgttgaagttgcgaaaagaaatgatgctgagctttatgtggctcatattattccaagtacagtctatgtttcaccggatgctagtgtctatgccaagatgacggcgatggaaaaagatcgtgtgaaggagcaactagcggctaatattcgttacgcgaataatcatgggctaacgaaggtcaccccgattctggaagtcggctcaccgaaaaaagaaattgcgattcgcattcctgaagaatatgggattgatttaatcatgttggggattacggggaaaggggttattgaacgaatgatgatgggatcggttgcccaatatgttagtgcccatgctgcaacgaatgttttattagttaaataagaacgtctggttccaaaaaagcggtcacgacattttttgtcgcgaccgcttttttgcgtgtggttagatgacaataatgtcactgttcaaatccaaaagcgtattgtacattaatattgtaataaattaatggatagattagaaatttcggagggacagttgatgtcaaaaaaagggcgtcaaattggtggtgtcattggtattctggtcatattcggtctggtagcgggcggaattgtggttcagcgacaacatcaccaacgagaagtaaaaatcgcgcaacaacaagccaagattaagcgacaacgacaagcgcaagaagcaaagaaacagcgcgaatcacaaaaagtcgctgctgctaaagcaaaggaagaacgacttaaagcagaaagccaaccgacaattgttgcagaacaagcgttagatgactacttaaagcaaattggcttttcaggtaccgcgttaattgtccgcgataagcaagttttgttggataaggggtacggcagtgctaatcgggccaagcagttggtgaatacgccagatacgctatatgcgattggttcaactgaaaaagcgttgattgcaacgagtttattgcagttacaagaacaaggaaagctaaacgtcaacgatccaatcagtcggtacctcccggactttccgaatgggcagcagattaaactgactgattttttacatcatacatcaggcattgtcggtcgggaccaagataatcagacgaagactctcgaccaattaatcgaagaaattattaaaaatgggattaaggaacaaccgggcaagtggcactatatggatgcgaactatattgtgctgacgaaggttttggaaaaagtgagtcatcaagattacaaaacgtatctaaaagaaaaaattctaaaaccaagtaaaatggcgcacactggtttcatgacggatcaatattcgcgattaccagcggcttccattggctatctggcaaatggcgctgcgggacaactccccaatttcacgcaactaccaggggtcggagatatgtatatgacggcgactgatatgtaccgttttgaccgcgcgttgtggactggaaaattaattaatgaacagagtaaggctcaaatgttccaaccagggagtacgtcccactatggaatgggcttttacaatgatccagcactcattgttaatcgtggttatttgtcaggctggaatgtgtcgaacggatttagccacggtggccgaatctatatcgtgttattttcaaacgaaaagaacgaaaaggtttcgctcagcaagatgaacggtgaattatatactaaaataactgcaacgatttaagtaaaaaaacgggtttaatgattcagatgaaggactttaattagtgttgatctgagattattgacccgttttttaattttggatgtgctacaaatgccgaattggtaaggatgttaaattgtgtaaaatttaattttggtaaaacgctttctttttggacatcggtaatctataatagttttcgaggaaacgttttcctaacattgttgttaaaggaggattaagatgactgaaaaatacattttggcgattgatgagggaacaaccagtactcgttcaatcatttttgatcacaatggtcaaaaagtcgccgatgcacagcgtgaattcccccagtacttccccgaaccgggctgggtagaacataatgcaaacgaaatttggaacgctgttttatcgacgattgcaaacgcttttatatcatcggggattcaaccccatcaaatcgcggggattgggattactaatcaacgtgaaacaactattatttgggataaggaaactggtttaccaatttataatgcggttgtttggcaatcaagacaaacaaatgacattgccgaacaattgaagaaagatgggcatgaagaattattccatcaaaagacggggctattaattgatgcttacttctcagcgactaagattcgttggattttggatcaagtgccaggtgcacaagaacgagccgaaaagggcgaactcctctttggaaccatcgatacttggattacatggaagttaacaggtggcgcttcacacgttaccgactatacaaatgcaagtcggacaatgttgtttaacattcacgatttggattgggacgacgaaatcctcaagattttaaacattccacgggccatgttacctgatgttcggtcaaactctgaaatttatggtgaaacagcaccttatcatttctatggtagcacggtaccaatttcagggatggcaggggatcaacaagccgcattatttggtcaattagctctccaaccagggatggttaagaacacctatgggacaggttcatttattgtgatgaatactggcgaaaaaccaacaatgtcagaaaacaacttgctaacgacaattggttattcaatcaatggtaaagtcaactatgcacttgaaggctcagtcttcgttgctggttcagccattcaatggttgcgtgatagtatgcaactggttgaaaaatcatcagattcagaagcagccgctaaggcttcaaccagtttaaatgaagtttatgttgtgcctgcctttacaggtttgggtgcaccatactgggactcagaagcacgtggttcaattctagggattacgcgtgggacgaaccgacaagacgttattaaggcaacactgcaatcattagcttatcaaactcgggatgtcgttcaaaccatgcaaaaagatactggcattgatatcaaagtgctccgcgttgatggtggtgctgcaaacaacaactatttaatgcaattccaagcagatattttgaatagctcgattgaaaaggcagctaatttagaaacaactgcaatgggggctgcatttttggctggtttagcagttggtttctggcaagatacagacgaattggcgcatattttctcagttgggcaacgtttcgaaccagaaatgcctgaagaagaacgggaagatctctatgctggttggcaacaagcagttgaagcaacaaaggttttcaaacatcgaccatataaaatgcgtgaatgaggaggattataatgacattttcattagaaggacgtcaacaagtaattaataacttaaagaacgaacaacttgatttattagtaatcggtggcgggatcactggtgctggggttgctattcaagcggctgcatcaggcatcaaaaccggtttgattgaaatgcaagattttgctgaggggacttcatcacgttcaacgaagttagttcacggtggtatccgttatttaaagactttcgacgttggggttgttgcagatactgttagtgaacgggccgttgttcaagggattgcacctcacatcccacggcctacaccaatgcttttaccaatctatgatgaacctgaagcaacttacgacatgttcagtgtcaagattgccatggatttatacgataaattggcaggggtaactggtacacaatatgccaactatacaattgatcgtaaagaagtactccaacgcgaacctggcttgaagtcagaccgtttgatgggtgctggtgtttatttagatttcgtcaataatgatgcgcgcttagtcatcgaaaatattaaagaagctgacgaattaggtgcatcaatcgcaagtcacgttaaagcagtcggaatgacttatgatgcaaacggtcgcgtaaacggtttgaaagcacacgatgaattaacggatgaaacattcgatattcatgccaaattagtcattaatactgctggcccttgggtggataaagtaaatgctttaaacacggaagtcaaagcacaagaaacacttcgtcctactaaagggattcatttagttgttgatagtagtcgtttatcagtgccacaaccaacttacttcgattcaggcttacatgatggtcggatgattttcgttgtgccacgcgaaggtaagacgtacttcgggacaactgatactgattacacaggcgatttcaaacacccacgtgttgaacaagcagacgttgattacctcttaaaagcaatcaacaatcgctatcctagcgttaatatcgctttaaacgatattgaagctagctgggcaggtttacgaccattaatttctaataacggtagctccgattataacggtggtggcgctaatagcggtaaggtttcagaagaatcattcaacaacttaatcaagacagttgatgattacgaaaacaaaacagctgctcgtgcagatgttgaaaaagcaatcagtcaattaagaacggcgcatgctgaagaatcagtcaacccatcacaagtttctcgtggtagtgatttgaaagtggctgaaaacggcttaatcactttatcaggtggtaagattactgattatcgtaagatggcagccggtgcgcttgaattaatccgggatatcttgaagaaagatttcaatgaaacagttcgtgaaatcgattctaagaaattacaagtttcaggtgggcacttcgatccaaataacgtggatgatacccttaaattctatgcaaaagttgcgatgaacaaagggattgatgaagaagatgcgattgatttagcaaaccgcttcggttcaaacgtcagccgggttgtttcatacgcggaccaaggtgctgctgaaggcttgaacttgaaagaaacaatcagcttaagatactcagttaacgaagaaatgacattaacaccagttgattatcttttaagacggacaaacttcatcttattccacaatgatcaattagcagccatcaaacaaccagttgttgatgaaatggcgcgtttattgaactgggatgacgctgaaaaagcacgtcaaacagaattattggattcagcaattgctgaagcacaattagactatttaaaataggacttaacttggaggaaatctcatggaacattcaataatggttcaggcgcttggtgaacttgttgggacgtttatccttgttcttttaggggatggcgttgtagcgggcgttagcttagcaaaaacaaaagccaacggtgctggctgggttgctatcacgcttggttggggctttgcggttactttaggggtatatacctctgcatttatgggacctgcacacttgaacccagcggtgacgattgcttttgcaatgattggcaagaccccttgggcagcggtggtaccattcattatcgcccaaatgattggggcgttcttaggcgcagttgtcgtttggattcaatactatccacattggcaagctactaaagatcaagcagcaatcttaggcacttttgcaactggccctgcgattcgcagcccatttgccaatttaatgagtgaattgattgggacattcgtcttaatcttcgctttactagcattaacacgtggtgaattaacagccggtttgaacccattagtggttggggtggttatcacagcaatcggtctatcacttggtgggacgactggttacgcgattaacccggctcgagatttaggcccacggattgcccatgcagtcttgccgattgccaacaagggtgattcagactggtcatacagctggatcccagttgtcggtccaatcatcggtgggattttaggtgcattactcttcgttgtattgccataacgataaaaaaacgattaaccaacaggttaatcgttttttttgtgtatttatgatttaaatacgaattattaaatatatttatgtaaaatagttcgtaaaatgttttgacatatcagatgaagattgttagaatcaaagcataatcaacaacgagaaagtgggcaaagaatatgagtgatgtggcacttgttatgggctctatatcagattggggaacaatggaacagaccgcttctgtattatcggagttgggcgtgagttatacgaaacagattatttctgctcatcggatgccggatgaaatgttcgccttttcaaaagaagcacaggcgaacgggtatcgtgcgattattgctggtgcgggtggtgccgcacatttgccggggatgattgctgccaatacagtcttaccagtcattggcgtgccaattcaaagtaaggcacttagtgggctggattctttattatcaattgtgcaaatgccaggtggcgtaccagtggcgacggttgcgattggtaaagcgggggccgttaacgctggtattttagcgacacagatttgtggcttgcaggtcccagcttatcaagtggcactgcaacagtatcaagcacggatgcatgcaaaggcggtggcaagtaatgcagactttgactaaccaaattttaccagggcaaacgattgggattgttgggggcggtcagttaggtcagatgatgacattagcggctaaagagatggggtttgcagtgattatcttagatccgcaggcagactgtccagccggacaagtcgcggatgatcaaattgtggcagcttatgatgatcaggcacaaattatgatgttagcgcaacgtgtcgatgtgttgacatatgaatttgaaaacgtcgatgctaagacgattgaagctgcccgagaatatacatggattcctcaagggacgaaggcgctacggattgctcaagaccgattgttggagaaacaatttcttgttgaccaacagctaccacatgccacctttgagattgtaacgacccctgcagaattaataccagctgttaaaaaagttggttttccttgtatcttgaagaccacgcgcggtggatatgatggtaaaggacaagtcattctacggtccgcaatggatatggaggtggctcaacagttgttaaccgctagtgtttgtgtattagaagcgatggtccattttgatcaagaaatttcggtcataattagtcagaattcagccgggcaacaagccgtttttcccgcaatcgagaatcaacaccgagataacattttacatatcagcatctgcccggcgcgcatttcagcggcgttagcggcacaagcggaatcggttgcggcaaaaattgccacgcagattgaattagtcggcacgttaggtgtcgagttttttgtcggccatgacgggcaactctacgttaatgagattgcaccgcggccgcataattcaggtcatctaacgattgaagcgtgtgacttttctcaatttgcaacccacattcggggcgtctgcaactggccactccaaataccacaattgtggcaatcagcggtaatggtcaatattcttgggcagcactggcaagcagcgctaacagccagtcggcagtcagcagattggcattatcacgactatggcaaagtggttcaaaaggtcaaccgcaagatgggccacgtcacgttattaacgccggctgttgatgaaacgttaacggcaattaaaaagactaaaatttgggactagaggggacgctaataaatgattgaacggtatacaaatcctgaaatgggtgcgatttggacggaccagaataaatatgaggcatggctggcagttgaaattttagcggatgaggcttggtcagaactcggacacattccggctgaagatgttgcgaaaattcgtgccaatgcgatgttctcaattccacggatcttagaaatcgaacaggaaacgcggcacgatgttgtcgccttcaccagagcagtttctgaatcacttggagatgaacgcaagtgggtccactatggtttaacatcgaccgatgtggtggatacggcgtatggttatttgttgaaacaagccaacaccattttgcgggccgatatcgatgcgctattggcggtgattgccaaacaagccaaacgttaccaagatacggtcatgatgggccggacgcatggtgttcacgctgaaccaacgacgtttgggttgaagctagcactatggtattcggaattaaaacgacataaggcacattttgaagaagctgcaaaaggcgttgaagccggtaaaattagtggggcggtgggcacgtttgccaatattccaccgtttgtcgaagcctatgtgtgcgaccatttaggaattcgcgcccaagaaatctcaacacaagtcttaccacgggacttgcatgctgcctacgtggctgaaatggcgttactagcaacttcaatcgagaagtttgcgactgaaattcggggtctccaaaaatctgaaacccgcgaggtcgaagaatttttcgcgaaaggccaaaaaggctcatcagcaatgccccataaacggaatccgattggttctgaaaatattacgggcttggcacgcgtgattcgcggacacatggtaacggcgtatgaagacgttgcactctggcatgaacgtgatatttcgcatagttctgccgaacgcatcatcttaccggatactacgattttgttggattatatgcttcgacggttcaccaaaattatgacggacttgacagtcttcccagaaaatatgaagcgtaatatggggcggactttcgggttgatttacagccaacgggttcttttgaagttaatcgatcatgggctttcgagagaagcggcttatgacttgattcaacctaaaacggcccaagcttgggatcaacaaactgatttcagaccgttattagaagcggatgaccggattatgaatgtgttgacgcccgctgatttagacgacgcgtttgattaccattaccatattcgccgcgtcgcagaaatctttgaccgcgttggtttgggcgaataatgatgaaaactttgaaatgaggttatttcaaagtttttttacaccctaatgtaacacgaacgattattttaattttaaataaaatatatgttatttggagggattcaagcatgagtgagacgttgttttattctggaaaagcgaaagatgtttttacaactgacgatcaaaatgtgttgagaatggtctataaggaccaagcaacggcgttaaatggcaaacgcaaggaacagattacgggaaaaggattattgaattatcagatttcgaaattaattttcaaatacttgatggcaaatggtattgaaacgcatttaatcgagaatatttcagcaactgaacagctcgtcaagaaagtgacgattgtgcccctagaagtagtattgcgcaacgtggtggcagggagttttgcccgcaagtttggtcaagcaccgggtaaacgattggccacgccgattatcgaatactattacaaaaatgatgcactagatgatccagccatcaatatttcgcaagccaccgcgcttggaattgtgacaccggcggaaattgaagtgattgaaaaacaaactaagcagatcaaccagctgctaatcgatttattcgaccgtgcggatatcgatttaatcgactttaagttggaatttggccggtatgacggtcgcttgattttggcggatgaattttccccagataactgccgtctgtgggatcaaacgacgcatgaatcgctagataaggatgttttccgcttgaacaaaggggatttagtatcggtgtacgatgtcgtattacgacgattagaaaaaattttagggggttctacagatgtttaatgtgcgtgtgcaagtgacttataaagattcggtgctagatccacaaggccaggctgtccaaaaagctatcgaacgacttggctttgatggtgtgagcggcatgcgcattggcaagtcctttgaaatgcaagtggctggcgatgaccaagccgcagttgaaaaaaaggtcgcacaaatctgtgatcaactcttagccaatcctaatatggaacaataccactacgacatacaaaaggtggcgacgaatcaatgaaatttgccgtattagttttcccaggttccaattgtgacgctgatttatatcatgcaattgaagatgtttgtcatgaaaacgctgagtatgtcccgtacacagcaactagcttggcaggttttgatgccgtattagtgcccgggggcttttcatacggcgattatttacgcagtggtgcgattgccaagttggcaccgattatgacggcagttaaggcgtttgcggctgctggcaaaccggttatcggtatttgcaacgggttccaaattttaacggaactcgggttattaccaggcgttcttttgccgaatcgacaaacccattttatctgtgacacagtcgcgttgaacgtgaccaatgccggtacgatgttcacccaacactatatgccgaacgaacaaattcggttgccgattgctcatggtgaagggaattattattgcgatgcagagaccctggaacggttaaaagtgaaccaccaaattgcatttacttatcaaaatgatgtgaatggtagtttagcgaatattgcgggcgttacgaatgaagccggcaatgtcttagggatgatgccccatccagaacgcgcagtcgaaaccttattaggtagcgatgatgggcaacgtttatttgcagcattaatcacatcgattcgaaaaggagggcaataaccgtgttaaagcaaccaacaccggcagaaatccaagccaccaagctttatcagcaatgggggttatcagatgatgaatatgaattgattcgtactaaaattctaaaacggttgccgaattatacggagaccgggttattttcagtgatgtggagtgaacattgctcatataaaaattcgaagccggttttgaaaaaatttccaacaagtggtcagcacgtgttgcaaggcccaggtgaaggcgctgggattttggatattggcgatggtcaagcagtggtctttaaagctgaaagccataaccatccctcagcagtcgaaccctatgaaggggcggccaccggtgtcggcggtattattcgggatattttttcgatgggcgcgacgccgattgcgcttttgaacagtctgcgctttggtgaattgacggatgaccacacgaaataccttgttcaagaagttgtggctggaatcggcgggtacggtaattgtatcgggattccaacggtcggtggtgaaatcggatttgatccatgttatcagactaatccactcgtcaacgcaatgtgcgttggtgtcatcgaccaaaaggatattcagcaaggtaaagcgcgtggtgctggcaatagtgtgttctacgtcggggctaaaaccggccgcgatgggattcacggggccacttttgcatcggatgaatttgcagatggcaaggcgacccaacgctcagcagtccaagtgggtgatccgtttatggaaaaactattaatggatgcttgtttggaattaattttgaagcatccagattggctagtcggcatccaggatatgggtgcggcgggcttagtttcttcaacagcggaaatggctgaaaaggcaggtactgggatgattctcaatcttgatcttgtgccacaacgagaaacagagatgtccgcttatgaaatcatgctttctgaatcgcaagaacggatggcgctttgtgttaaagctggtcatgaaacagatgtggttgccttgtttgaacgatatgatctggatgcggtccggattggtgaagtgactgagagtcaacaatatcaattgtggcatggtgggcaattagtggccgatttgccagtggcggctttaacgagtgatgcgccgatttatcataaagcacaaactgaaccagcacgcatcgctgaatttaaagcgatggcgccttatcagtcggtgattaatgatgttaaacgaacatggctcgatttattgggccaatccacgattgctgacaaacgctcgctatacagccactatgatgcacaagtgaagaccaataccgtcgttttaccaggaagcgatgcggcggtcgtccgaattcgtgggactaaaaaagcgctcgcgatgacgacggattgtaacgggcgttacttatacctcgatccaaaagtcggtgggcaagtggcagttgccgaagcagcacggaatatcgttgcggcagggggccaaccactgggaattacggattgtttgaactatggcaatccggaaaagccagaggtattctgggaatttgatcaaagtgcccaagggattgcggcggcctgcgaggttttcgatacgccggtcatctctggtaatgtttctttttataacgaattcaatggcgaagcgatttatccaacaccgatgattgggatggtcggtttgattcgagatacagccgacatcacgacgcaagattttaagtcagcgggggatttaatctacctcgttggccagacggatacgaatttagcgggttcggaactccaaaatatgttgacgggcaaagttgcaggacgattaagcggcttttcgttagccactgaaaaagcgagtcaagattgcgtcttagcagcgattcaaaagggctgggtgactagcgcacatgatttatcagagggtggttttgcggttgcgttagccgaaatgacttttaaagaacaactcggctgccgcgtgcaagtcccccttaatcaacaacagttatttgttgaaacgcaatcccgctttatcatcacggttcggccagaaaatcagacggcgtttgaagcgttctgtcaagatcaggcgcaattaattgggacggtctcggccacgccaattatgcaagtgcaaacgactgaatcaactgttgagttatcggtgactgaagcgaagttaagttggaagacggcgataccatgtcaaatgaaataaaaagtttaaatgaagaatgtggtgtttttgggatttggggtagtccagaagcaaaccaaatgacttattttggcttgcatagtttgcaacatcgtgggcaagaaggtgccggcattgtcactaatgatcacgggcacttaatgggttatcgcaatcgcggtttgttggcggatgttttccgcaaaccggagcacttaacccaactaaccggggacgcggcaatcggtcatgtccgttatgcgaccgctggtagtcacggtttagaaaatattcagccgttcctattcgattttgcaaccgatcaattcgcacttgcacacaatggtaatttaaccaacgcggtcacactgcgccgcatgcttgaacaatcgggggccatcttaaaatcgagctctgattctgaaattctgatgcatctgattcgacgtgcagaagggcctgatttgcacgcgcaaattaagacggcccttcaacaaattcgtgggggctttgcctacctattattaacgcaagattcattgattgcgatgcttgatcccaacggctttcgaccactctcgattggacgtttagcaaacgggggctacgttgtggccagtgaaacctgtgcgctcaataccgttcaagcaacttttatccgagatgtgcagccaggcgaaattgtgacgattgatgcggacgggttacattctgacttcttcacaaccgaaaccacgcattcaatctgttcaatggaatatatctactttgctcgcccggattctgatatctgtgggattaacgtccatgcggcccgcaaacgaatggggaaacagttagcacgcgaaaccgcagttgatgcggatatggtaattggggtgccgaattcatcgttatcggccgctagtggctatgccgaggaaagtggtttgccgtatgaaatgggcctcgttaaaaatcaatacgtggggcggacgttcattgaaccaacgcaagcccttcgtgaacaaggggtaaaccgcaaactcgccgtggttaaaagtgttgtggctggtaaacgaatcgttttagtggatgactcgattgtgcgtgggacgaccagcaagcacatcgtgaaacgtttgaaagaagcgggcgcattatccgtgcatttgcggattgcgtccccaccattgaagtacccttgtttttatgggattgatattcaaacacgtgatgaactgattgccgcgcatcaaagtattgctgagatgtgtgccacgattggcgcggattcacttggctttttgagtgaacagggattaatcgacgcgattgggttacagcaagatgcgccgtattccggattatgtatggcgtatttcaacggcgactatccaacgccactttatgactatgaagctgcctatcaggcaagtttaaaagcagataaggagcaacaatcatgacaaatgcttaccaaaaagccggggtggatgtgacagccggttacgaagtggttcgtcggattcaaaagcaagtcggcgcaaccaatcaaaatattggtcgcttcggtggtcagtttgccttagcgatggggcagtatgaaaatccggtgctcgtttcaagtaccgatggggtcgggaccaagttgatggttgcttttgcagctgatgcacacgcgaccatcgggattgattgtgtcgcgatgtgtgtcaatgacattgttgcccaaggcgctaagccactttatttcttagattacttagcggctggtcaaacgcagccggataagatcgaacaaattgtcagcggcgttgttgcaggctgccaagctgctgacatgctgttaatcggtggtgaaacggccgagatgccgggtatgtatgctgaaaaacattatgatttagcgggttttgcagtcggaattgctgatcaagctcaattaattactggtgaaacgattcaaacaggggatgtattaatcggaatcgcgtccagtgggattcattcgaatggctactcacttgtgcgccaaattttcttcgaacaacatgggttgtccgtcgacagtcacttacccgaattgcctggtcagacactcggtgaatggctattaacaccaacgcggatttatacacaagcatgtcagccgtttatcgaacaaggttttattaagggcgcggcccacattactggtggaggctttattgaaaatataccgcggatgttgcctgacaacgtgatggccgaaattcaattgggaacatggccaagcttaccgatttttgcggcacttaaacaatatgggcaattggatgcactcgagatgtataacatttttaacatggggatcgggatggtcttagccgtcgcaccagaaaaagcggcacaagtcctcgcccaattgaacgctgaacaagaacaggcttaccgaattgggtcggttaaaccgcgacaagaaaatgcaatagaattggtgggttgatgagatgaaagtggcgatttttgcttctggaacgggttctaactttgaagtacttgcagatgatgacgccttaaaaaaagcgggcatggagattatgaatttagtgtgtgaccagccgggcgcaccggtgattgaaaaagcgcgccaacgaaatgtaccggtgacggtcatccgcttaagtgattatgatgatcgacaacactatgaagcagcaattgtcgcgctgttggcaccgttacagttggattatatattgctagcgggttatatgcgggtgattaccccagtattgttgcatacctacccacaacggattatcaatattcatccgtcgttactaccggccttttctgggttacgaagtattgaacgggcctatgcggcacaagtggctgaaacgggcgttacgattcactacatcgatgaaggtgtcgatagcggtccgatgattgtccaagcaaaagtaccattgttgcctggcgatagtttagccgcattggaacaacgcgtgcacgatacagagcacgcgatttatccgcaagttgttgctgaattaattaaaaaccaaaatagaaggagtaattcaatcaatgaaaagagcgttggtcagtgtttcagataaaacaggaattattgaatttgctaaaggattagtagcagctggttacgaggtgatctcaacaggcgggacattcaaggtattacaagaagcgcaagtaccagtaattgcgattgatgaagtcactcatttcccagaaatgttggatggacgggttaaaacacttcatcccaatattcatggtggcttgcttgccaaacgcgacgaaccaacacacatggccgctttagcagcccatgacatccagacaatcgatttagtttgtgtcaatctgtatccttttaaagaaacaattcaaaaaccagggattactgaagcgcaagctgtagaacaaattgatattggcggaccttcaatgttgcgttctgccgctaaaaacttcaaatcagtgtacgtggtcgttgatcaacaagattacgcgcaagtcctcgaacacgtcgtcgatgaggggcaagctgcagttgattaccgtcgttatttagcagccaaggcattccgccacacggcagcttatgatagcttaattgccggttatttaaccgaagcagtcggcatcgaattccctgaaaaattaacacgttcatacgactttaaacaagcgttgcgctatggggaaaatgcccatcaaaaagcagcgttctatcaaagcagtttaccaacggctttctcgattgcctcagcggtacaattacacgggaaagaattatcgtataacaacattaaagatgcggatgcggcggttaaagtggtcgcagaattcagcgaaccttgtgtggttgcgatgaaacatatgaatccgtgtggcgtcggcttgggtgcaaccatctatgaagcttggcaaaaagcctacgcggccgatccagtatcgattttcggggggatcattgccttgaatcgtgaagtggatgttcaaacagccgaagaattacacagtttattcttagaaattatcatcgcaccaagctacaccccagaagcgttagccattttagaaaagaagaagaatttacgcgtcatgacgcttgattttgaggctgctaagcaagcggatcgcttcgaaatggtttctgttttaggcggcttactcgtgcaagaacgtgatcgggtgactgatcaagcatctgaattgaaggttgtgacggacaaaacaccaacggctgatgaacaagctgcgatgttatttgcccaacgtgtggttaaacacgttaagagtaatgccatcgtggtcgcaacaaaggaccaaaccctcggcattggtgcggggcaaatgaatcgggtgggctctgtgaagattgcaatcgaacaagcggaagccaatggattaaaagcaccgttcgtcttagcatctgacgcctttttcccaatggatgacagcgttgaatacgccgcagaacatggtgtgacagctgttattcaacctggtggttcgattaaggatcaagattcaatcgacatggccaaccaaaaaggaatcagtatggtgacgactggtcgccgtcatttcaaacactagccaataggaggcaaatcatggatctattagtaatcggtagcggcgcgcgtgaacacacgattgcgcgtgcgctacagcagagttcaactgttgcaacggtctattgtttgccgggcaatccggggatgcaattggatgggattcaaacagttgcgattgagatgactgactttgcagcgatgattgcctttgcgcaggccaaaaaggtcgcctatacgattgttgggcctgaacaaccgttagtggctggcgtagtggatgcttttcaagacgctggattagcgatctttggaccgcgtaaagcagctgcggcattggaagggtctaaaactttcgccaaagaaattatggcggccgcgcatgtgccaacggcggcttatcaagcctatcagactgtccaagcggcactggatgccctcgatgacgttcgttatcccgttgtgattaaagcggatggtttagcggctggcaagggcgtcgtcatcgctcaaaatgacgtgagcgcgcggcaaactgttcaggcgttctttgaacagggcgtgccccagttattgatagaagattatctcgaaggtgaagagttctcgctgatggcgttggtggcgaataatcgcgtctatccattaccggttgctcaagatcataagcgcgcctttgacggggatcgtgggcctaatacaggtgggatgggcgcttattgtccagtaccccagattagtgaccaatgcgttgcagaagcggtaacgactattttagaaccgattgtggcaacgatggctgaacgtcaaacgccttttaccggtgtcttgtatgcgggcttaattgccacacaacacggggtgaaagtgattgagtttaatgtgcgctttggtgatcctgaaacacaagtggtgctaccacggatgacgggcgactgggcccaagtttttgcacaattattgaagggggaaaccccaacgttacagtggcaattatcaggcattacgttaggtgttgtggtggcttcagatggttacccgacacaatcgacaacgccgtttgttttacccactttgcaacaatttgcaaaacgcaacagcacatttagtttcgctagtgtcgcagaacaagccaatcaattggtcagcgctggcgggcgtttgtataccgctagttattctgctgagacgctaggccgagctagtcaacaggtctatcgggatttagcgcaactcgctttaccgacgactttttaccggcaagacattggatttcgaacgcaagtgaaataaccgagtataaatgtttgcttacttttgataagagaaccatgataaaggtattcaattattgaaagaaggaatctatcatgggatatcatacaagtgaagcggaaaatccaatcgatattttaaacttagcgtcgttagaaggacgcgtgaaagaacgaatggaagctggcgcgtttggctatatccgtggcggtgctgaagacgaatggacgatggctgaaaataccagtgctttcaatactaaaaaaataatgccccgtgtgttaaaaggcatcgatcatgctgatttacatactaaattatgggatattgatttaaaaacgccgattattcaagccccctcagcagcccaagggttagcacatgaaaaaggggaagtcgacactgctaaaggggtcgcagcggctggttcgattttctcaattagtacctatgccaatacattggtggaagatgcagccgcagcggctcctgatgcccccccaatttttccaactctatatgagtaaagatgatcaattcaatgagttcttattgaaaaaagccgttaaggcaggtgtgaaagccattattctcaccgtcgattcaacattgggtggttatcgtgaagcggacatcgagacgcaattccaattcccactaccaatgcctaatttagcagcttatagtaattctgacggtgctgggaagggcatctctgaaatttatgctgccgctaaacaaggattagtaccagaagatattcaaaagattaaacaaatcacaaatttgccagtctttgttaaaggcattcaatcaccagtggatgctgaaattgccattcaagctggtgcagatggcatctgggtttcaaatcacggtgggcgtcaattagatggcggacctgcttcgtttgaagtgttgcctttaattgcgcaacaagttgctaaacgcgtcccaatcgtttttgatagtggtattcgccgtggtgaacatgtctttaaagcactcgcaagtggggctgatttagtggccattggtcggccaattatttatggtttaaatttaggtggcgcccaaggggtacaatctgtttttgaacacttaaaccatgaattatcgattaccatgcagttggctggtaccaagacaattgatgaagtgaaagaaacaaccttacttgattaatatggtatactgagagtccttggcaggggcgctaaaaaaagcggttcaactcaatgatgagttggaccgatttttgacgttaacctaattatttcatttatattatacctaattttagccgcaataagcagtaaaatcacttaattcttcaaattaaaaaccgctaacgtcaagcgagacagtcaaccacgtttactagaatgagaggctatgtattgtaaaaattgtgtatatattgtaaatttttctgtttttatccccgtaaacagtctagaattgtagtagtgcttttttgaataatataactatattaagaaggataattgaatctatatgaaaaacattgctttgaacatccgagattttttcttagatgacaaactactcttagccgctgccatcgcagccattgtcacctcatttttcaaccgcccacaacttagttacgttaatttccacgtgatcgtcagcgtcttttgtattatgacgctcgttcaagtttatcaacggctccacgtgcttgattacttcgctcgcgagttaattatcaaaagccgttccaaacgagccttgatgcagatgttattagcactaacgtttgtcggcgcgatgttcttaaccaacgatatgacggtattaacgttcgtcccgttattcatcttaattgcgcgtcaacttgaattttcaccaatcttaccggtgacgctcatcacgatttcggctaacctcggttcttcattaacaccgtttgggagcccgcataatattttccttgtttcgttttaccatatgacgattcgccatttcttcgaatattcaattcccgtcttgattgtcagcgtcattatgttggcagcaacgaccttcctctttccaaaagaacccatcaaacttcacgggttacatcccgttgaagttgaaaaagggccactgtggtatttcgttccattaacggttgtcgttttcctcgcagtgttctcattaattccattatgggtgacaccaattctagtgattatcgcgattctagcgtttgatcctaagttattcaaaacagtcgattacggcttattactcacattcttctgtttcttcatcgctgttgggaatttaagtcacatcccaacgattgccacattcatgcgatcaattgtcggaacagcaaaacaaacctacatcaccgggattatcagttgtcaattgattgcaaatgtcccaactgaaattttactttcaagcttcactaaccacagccacgcaatgttcttagccatcaatatcggtggggtcggcacaatgtttgcctcacttgcaaacttgattgcttacaaacgatttaagaaaggctggggcaaagaccttggtaagttccttgtcgttttcactggcatgaacttcttattcttaatcattttaggggtattcggctattttctcatctaattcttaaaaacagggcaactatctttacgatagttgccctgttttttgtcattttaacagtaatcgtcatgatagcattcccattcgcgtcttactgccgatcaacgccatcgtgacgccctttaattaagttcctaaattttacaaacatatgactaacatgacaaattaccccatttctgtaaagaaactgctatttaattgacatgcagcattgatatactctcctagttccaaaacttacctaggagtgacgctttattatcaaaaacaaaccattcttgttagctatcggccttatattgctgatgctaattacaacgaatatcgcgcgtgccgcattaaccaatgaagcagcaccagaaacgaaccaccctgtccaaaagctgatgtcatctaaagccattgaacaattcacggggcaacctgcccaagcagctgaaacgtcactggtcaaacacgcaactgttctaccaacagacaaacccgttagctgtccgattcatccagatcctgattccgcagaaattaaggaaccaacgcccgcccctgagccagaaccagttgcggccccagcacctgccgaaccaaccttaattgacaaagggacattcaaattaaccttttacgatcccgcggtccttggcgcaacaagtatgcccggtggaatgtacgccggagtcgctgcgcacttgggcgttatcccccgcggctcacaaatcaagatcacattaagtaccggtgaagtatggtaccgtgttgtcaacgataccggaaccttcgccgcttctaactcacaacaattagacgtcgcaatgccaaattgtgacatcccctctgccggtgtcttaaatgccaacgtgcagattgtccaacttgcttaattaaaaaaagccaaccattcagatattacctggatgattggctttttttgatgttcaatttagaaataatcccataacatcggtttcgtatgactaaacgcagcactgagttgagcgatttgctgcggtgtcccttgcacatgcccaaagtgtgcttgactctcaagtgtgcgataccccaacatcgccttagttagattttgaatcgtaacggtgatgtctgcggtccccgttgctaattttgtcacagcagcatgtcctgcatgaatacttaactgccataaaccggcattttcaggtaagaaatcatcttgaaccgcaatcgttaccgcagatagttccgctacttgataggcataacgcgcgaagaaatcagctagtgacacaatccgtgccatcatataagggacggttgtcgtctttacgattgtgggatcaggcaataaatcagctagcgactcagtcagtgcactctcatactgaattgtcgcataagctgactgatgcttaagaataaagctcaatagctgttcttgacttgcaactgtcgaggtcatcagttcttgaatcacaaacgtctctggttggcgcgtataaatcatataccccgcaacccgtcctgtatcttctcaatagaccgccacttcccaatcactatgcttcataacatcatattgccaccaccaatcagtccgctgcacaccaccgacttgattgtccggatgctgattgaagaacgcatcaatcaacggcaccgcttgcgccaatgtcatccgtactacttatcctgcactcggtgcaaatttcaatcgtggtaagtcagccgtttgaatctcaaagtgcgtctgatcaaaagtttgttcatagccaaaccgacgatagaagccgtatgaaaatggcgcgagatacgaaagcgtcacaccttctgcacgcatgtgttcaaacgcgagttgcatcaatgctgcaatcccacctttgcccgcaaactcggggtaactcgcgacataaccaatgccactcatcttaaaggtttgcccattgagccgtacgtcaaacggcgtcgctaataagccacttgccaaccggccgtcatcaaaaacgccaaaccctgcactatgtgtatacaactgtttgaagaattcttggcgcttagcactatccggtttattaaacgcatattgtgctaattcataaaatgctggttcatctgttccaattaactttcttttttcaaccactgcacattcctcctgccatcacttatctttcactataagtgagcgagcaacaagatgcaagcgccgcctttgtgattagaccgctttttatgcataaaaaaaacgaccttttcttgggagtggtcgtttttttatagggagaaatctatgggtattagggagttatttcgttaacgaaattgcacgaagttgttgtgaattcactagaattcgttgcatcaacttgtgaaccgtaaaacgatcagttggtgcatagttcaagattaagatatgcacagtttcttcacatttctcaataaccttaccgatctacgtcgcagacataatttcgtttgattggccgcgaattaaatcacctacttgaatcgccatgtccagttcacctcgttaatttatttaaccatgacctcattataacgaaaccgctttataaaatcaattatttacttattgtcataattagtaaatatttatgattagtcaagcagcttgcctatttttgaatcttgcgatagtcagcatcgaaataccggccttcttgaatatcttcaatcataccttcataaggtgcttcgctaattacgtcttcgttattttgtcctgcatcacccatataagtaattgtggcaaattcaggcactaacatcttaggatatgtttcatatttttcacgtgattcttccatgagtgcaatgtgatcattttggtaggtcactgtgatttctggatgttcttcaacccatttagggaagaaaatcatgccgtgtaacttgttttcgtttggcatgaagtccaacgcaacatcagtcccagttggttctgtccaagtaatcttgaagacgccgtccgttaacttaacgatgttggcttcttgatcacgaacccaacgacctgcaaccatcccaccatgaattcggtagtcaactgtgtggtcgttctttgcataccattcatacttccacccattatcgtaagtgtaaatgaaatatgtccctaagaaatcttctaattctttaaattgttttgtccttttaaaagccttcatataatgtaattaaatacatgtttttcttaacgtgataagtgtactgctcaatcctttttttgtcaactttaaaaaagggcaaaaaaaaatcgccagcaaatagctgacgatttttcttaattgatttcagttgctaattggcgtttcaccgcgtgtttaagaatcagcggtgccaaaacagtggtaatgataatcacgaaaataatctctgagtaataaagttcactcaacaatttagcgttgtacccaatctgcgcgataattaacgccatctcgccccgcgaaatcattgccgcaccaattgtataggctccttgtggcgaattattcatccaacgcgcaccgagaccacttccaattaacttcgagaaaacagctaacacggttaaaatcgtaataaatagaatatgttgattcaagcttgctaagttcatcgataaaccgatgctgacaaagaataccggaataaatacggtatacccaatcggttcaatatggcgattaatctcttccttatacggggtttgcgaaatcgcaatccctgcgaaaaacgcgcccactaccgcactcaattcaacggcctcagcgaaccaaacaaatccaaaacaaatgattaacgatgtaatggcgctcgcatatggtactaacaaacgacgactcaaatgcataacaaatggcacaatccatttcacactaaagtagaccgcaaccatgaataaagcttgcagcaataaactcaaccccaaactcatgtgggttgaactagctgcagccagttgcgccccaaaaagactggtcaagacactcaagataattacggccagtaagtcatccactaccgcagcacctagtataatcgtcccttctttactttctaacacgtttaattcacgtaaaacttcgactgaaatcgatactgaggtggctgcaaaaatcaccccgatgaataaactctcaagttgactaataccaaaggccaagctcatcccatacatactgatcaccgggacaatcacccctaagacggcgaccactaaacttggtttgaaatacttcttcaacaaggtcaggttactctccaagccagcgatgaacatcaataatacgacaccaatttcggaaaacgtgtggataaaagaattttcatgtaagacaccgaacaacgcgggtccaagaataatccctaccaggagttgcccaatcacagctggcattccaatccgtttgctcatgtgtcctgccaataaagtactgattaaaataattgctaaagttgccattgattcatttccctccataaaaaaagcacgccaaaattcccttctaccaccctaaagaaggaaatcttgaacgcgcaatgcttcaaccgtttttttaacttatgtaataatactaccacaaagccgcactgggcgcaaagtttaaacgttgaattggtaatagtattcattagattgacatcgctactttttcctgataattttagagtaataactaactggaggtgagtatttttggatgacggctcggacgaagcgttttgtttaattcatcagattattccttattatcggcaagaataacgatcacgaacgaccgcattttgactttcgataattaaaaggagcttaccatgactaaaacacacgcttatcaacaaacattagacgaactgcaaaccaattatgcccaccaagattttgaacaggggctttcgcaaacagaagcggctaaccgcttagcaaccaatggtccgaataaactcgagagccatcacaccccgaagtggcaacttttcgtgcgccaattcaacaacttaatcatctacatcctaatcgtcgcagccctattaacactcatgatgggtcactattcggatgccatcatcatcggtctagtagtcatcattaatgccatcattggttattatcaagaagcgaacgcatctgatgctttggaacgaatcaaagaaatgttggcaaccgaagcaaccgtttatcgtgacggtcagcggatcgacatcccaactgaagacttagtggtcggcgacgttatcttcctagaagctggcgatagtgtaccagcggatttacgaatcgttgatgccgataatctgcgtattcaagaatcagccttaaccggggaagcagactcagttgaaaaaattgcaacacgcttaaccgaagaagaagttgcccttgccgatcaagtcaacatggcctttgcctccacttccgtcactaacgggagcggcttaggcgtggtcgtcgcaaccgccgctgataccgaaatcgggcaaatctcagttgctgtcaccgaaacgaaaacccgcccaaccccattgactcgcgaaatcaacggcttagggaccggcgtttcatttgtcgtcatcggtgcggccgtctttttattcctcttcggcttacttggcgaacattactcactctcagtattagcaatcgcgattgtcacgatggtggtcggttcaattcctgaaggattacccgcaacaatgtccgtaatcctcgcaatgggggtcagcgacatggccaagcacaaacacgccatcgtcaagagcttacctgccgttgaaacgttgggctccgtcgacgtgattgcgaccgacaaaacggggacgctaactaaaaacgaaatgaccgtgaccgaaattatcaccgccgaaacgacttaccaagtcagcgggaatggctatgcgcccgaaggtcagattttattaaatgaccaacctgctgaattggataccaccctcacacaattcttagaggctagttatgaagccaacgatacgacgctttatcaagccgacaatggttggaccattaacggtgaaccaactgacggtgcctttttaaccttatatcataaggttcatggtatcgacgacttaccaacaaatacagaaattgacatgttacctttcgattcggattaccgctacattgctaaactcgtgcaactaactgatggtacgcaccgaatctatatcaaagggtctccagataaattattcccaatggcccaacaggcaatggtcgatttcccaatcgatgactggaatgccgatgtgacccgtttatcagaacaaggcaaacgggttgtggcggtcggttatctcgacgtgccaacaacgactgctacaattacccatgaacaactccaacaagggattcaactcttaggggttgccgggattatcgatccgccacgcgatgaagtcatccaagcgctcgccgaaatgaacgctgctggggtcgatgtcaagatgattaccggtgaccatccactgacggctaaagcaattggtgaaaagttaggcttagcaccaacgattaatgcgattaccgggccggaatgggatcgcttgtcggacgctgaaaaaccaaaagccgctttagaacaccaagtctttgcccgcaccacaccacataacaaactcgaaattgtcgaagccttacaagccagtcgcaaagtcaccgcaatgaccggtgacggtgtcaatgatgcgcccgcattgaagcgcgctgacatcggggttgccatgggaattaaaggaaccgatgttgccaaagattccgcggatatgattttaaccaacgataacttcgcaacaatgtccgtcgcaattcgtgaaggccgccggatttacgataacatcaaaaagagtattctcttcttactcccgacttccttcgcggaaggcttaatcatcgccttcacgattttgatgcaacaagatatgccgttgcaagcgacgcagttactctggattaacatggtctcggcgattacgattcaattcgccttcatcttcgaaccagctgaagatggcttaatgacccgcaagccacgtaagaccggccaagcgctgatgaataaacacgatgttttccaaatggcatatgtttccgtcttgatggccttaatcggcttgttagcctacgattggttactcggccgcggtgtcgatcaagtcacagccagcacaatgatggtcaatatcattgtcatcagcaagattttctacttgttcaatattcggactgcgaaactcgccttttcaaaagctttcttcaccaaccaaaaggcattcggcattatcgccctgatgattattctccaattgatcctgacctacgtgccattcatgcaacaaaccttctacaccgaaccgcttaccttattagaatggggcgtttcgatcggcgcaggcttcttgattctaatcatcacggaattcgataagattatccgtttaatctgggcaaaaagaaaggcatagtaaaagagcgtttttctcgataggatgagagaaatgctcttttttggtgtgcttttcgaaactggcttttccggttaactacaaaatgtgacttatgaccaaacccgtcataagtcacatttttaggttaatcctcaaagtcgacccgcttcaaacgcactctaaacgtgcttcggcaagcatatttctgtacttaaccaaattcacccaatcggcgattacatcgccaattgggcaaatccagttaatgctcaaaatataaccgcttgcctacgcactctataatctactaatcacttcttctacattcttaatctccaccgacattgtgccgtctgggtggttgatgaattcaaatagatttgggttttggtaaacgtcgattgggacgattagttcgatgccgtttgagagtttgagtttttgtttgccgtatttcttttcggcgatttcgcggacggctggtgagattggcgctggtgctgctggcgcgttttccgtcatttctgctttaaactcactttgggctgaaacgttgtctttaaaaatcttcgctgccatctggctcgtgtcgatttcaccattggtttcgattgtatcgtagatggcttctttgacgttggcgaccacatcgtgtttggcaacttcgaacttcttgccgattttttcagcggcctttttaacgaccttgacgttttcttctagcgatggcgctggttcgctttcaatcacgttcgttgataaataggtcatcttttcaccggagaaggtgtacttcttctccatcaattcgaagccaaacgtctggaggttaatcgcgaacccctcatccgccttttgggtcttattcgatagaatcgattggtgaatgatcagttgattcatcaatggcccctcttcagcattgacataatgggtgaaggcttgatgataatcgaccttcaaaaaagccaagtaagcttgggcatcttgttcatacaagacaacaaacgcatccgcactcggtgcatcgtcacttttctgatagaccgtgtaccatttttcaacgaggcgttggctagcgccgataaaatcagctgtcgcatcgcgcagaaaagatgcgagctcagcatcttggcgtagcacgccggtcttactctgggcagacgataatttcttaatcttgttggttaaatagtcgcgtgtgttcccattggtgagatctagcacctgttgtgagtaaattggatcgccgagttcgcggtcgaccacttgtaaaattgcttgtttcaaataaatatccattagttaacatcccatctgtctagcgtgtaaagtattgagcgccttcaatcgtgtggaagaaaatcaccgtttcgaccatctcattgttgacgctttttaaaaatggccattcgccttgtaacacacggagtgccgtgcgcggccgtgataattcccgttcaaaattggcctgtacctgaacgggggtgtctttaaaaatatgcgcatcgtataaatagcgcgcatatgccgcaaaaatctgttgggcctgttccgttttaatcgcggcatacacttcacggagtgtctgcagtccatatgtcatcagacttgccaacatcaacgacccatttctagtctcaacacgtttcaaatagcgaattagattaccccagaactggctatacgcctgaatctcatcttttcggagatatggtgctacgtcagtcacaaacgggtaatgccaatttttagcattcaaatagcgcaccgtcccaatgtagaacgtatacggaaagccaaaatagatccgcgttaaatctttaatgaaccattcattttcaattgtagcgtaattgtgccccaaaatcgcgtggacttgcatcgctacagctggatcttgcgtattgttgtgcttagtcaatgcgaataattgttgccattttgaagcggataaaagatccggccgataatgctttatttgttttaactgaaccggggcagcattcaaggtatagccaccatcaaacggttcatccaataattggaccgtctgcacaaaatgccccccgagtgagtgacccagtccatagatgattgttgccggattaattcggcgcacccgccggaccacataccgcgtaaaccgccgtgcgagttggagttgctcatcattttcggtattgccaatcagcatcgcatcaatattatacttccaatcttgataactctcacggacataattatccagccgctgcgtaaacgacttaatccgcggatcatccatcgtcccctcagtccccttgtaggaaatgtaggtatacgattggcgattaagcgtgacgtaataggcaactgccgaaaaaccagtttgttccgcattcggcaaaaccgttcgcgcatcatagtgaatcaccgcttccgccgcttgatgcgcgtgaataaacacgaggtacttcacgtaatattgcaattcctgcacgttaaaatactgatctaaataattaagagccatcatgtccattttaaaagcgcggctatcaaatggatcggccagtatcggtcctggcttactcgtggccgccactttatcaggggctatatggtataaataggcgagcgcctgcttcgtcagtaccgtactctcattgattttttcattttgtaaattgataatcagttgtttcaaacgattaatcttgcgttggcggttaaattgcggatttgcttgaacggctgccaaactcgccacatccaatgcctgcagtcgccgtaacttggcccacaaatagggatcggctcccgccgtcgccaataattgatttaatagttttattttacttgttttaagttgttgatagctgaattctagtcggttattgcgccgtaataaggcctgcgattgcgcacggtcaaacgtcaacggcacatctaaatgcgctttgaacaataacttacccatgtcatcgaagacttttgccaaccgaaagagcgtcgagatgatcactgtcgtttccatttgcatcattccttatttttgtaatacttctattataaagtatctgactcaaaaaaactgagacgaaatcgtcccagcttagatggttttgggtttgatgcgcacacctggttcaaacgtgctttttggtcgcaacaacttccgcttaagctaaaatcaccagtaactccaaaaacggattactggtgattttgtcttaatgctcatttgctaaccgcgaccaaacgcactctgttcttaaacgtgcttcagcaggcatatttctgtggctaaccaaatttgccaaattagcgattgcgtcgccaattcggcaaatccagttaatcctaaaaatacgaacgcctgcttacgcactctgttctatgcagtaatttttttgtccacagcttggacacactagttgtcttgtctttggcgtgtgccgggcaaagaacattttacttaggcgtggtttgaagaccgtcttgcaattgggacatagatagacagtttcttgatagtagaatgttgtcacataaatggccatcgcaatgatgaccggtatcccaatccacattggccaccaaattccacttagaaacccaagaattaataagccaatttccacaccatcaatcaataagccccacatcagcattcgccgatgtaatctttttaactgtgttgttttagccattgcgtcttctatgtcgctgattgtcatttcaaaaggcaccgcgctagtattttgaatcgattgcagtacaaactgcaacgccactttctggttagctaagtctgtttctttttggactaactgattgagttgctgttcgactagcaatgtcagtgtatccgtcgaagcttgactcgccatcactttttgaattgccttcagtgaaaagcccagctgcttgtagcctagaatgacttttaacgtctgcacttgcgcatccccatacagccgtcgtccattttcagttaagcttgccggcttcaacaaatcggcctgatcgtaatattgcaccgtccgcaccgaaacatcacataatttagcgagttcacctgttgtatattgcgccatagaatatcacctccataccttgatactagccgatgacgtaacgtcacaagcaagtaaaaaagcattatttgctaaaacttttattcgttctcctttaatgcaccaatcatatcaatcccttttaacttgcgatgggtcatccccatcacaatcagtgaaaatagcaccgtcatccctgccgcaatcaggtagccgctagctggaatgatgagtggaaaggccacttgttctgacgaggccatcgtgatgatgaaccaagtcagcaatttaccgattccaaagccaagcacaatcccaataacggtgaagattacattttctcgcacaatataggccgtcacttctttgtcgaaaaagcccaggactttaatcgttgccaattcacgttcccgctctgaaacgttgatgctagtaaggttgaataagacgacaaacgctaaaaccgctgataacccgatgaaaataaaaacgattgggtctaaattagcactagccgttgcttgcttagccccttgatcactgataaacgttgtggccgccacttccgttgtttgttgcaaacgggtcgccaactgtttttcttgcttggtagtcatcttagcggtgcgcacgagataggcattagccgcaactggttgttgtagcgtttttgaaagagcagattggcggagatagacgctgttaccaaggtagttttcactgatacccgcaacctgaattcgtgcacgctgaccttgtgccgtttgtagcgttaaccaatcgcctttttgaacagcatatgttttagcgaggttcgcagcaataatcgcaccgtgtttcggcaatgtgagtcgttgttgttctcgcggtgtttgcaaagcgacgtactgtgcaagttttgcttgatcagcgaccgcacagactgtcgccgcttgatccgtaatccctttttgcttgaacttaacctgggtcattgtgaccggtaagtaagaccgaaccttctcagtctgtgttaaaatcgacttcgtttgggctgtactattcggtattttaagcgtcacaattgcttggtaatgggtcaattgcttaaactgacggtcagcaacttcgccaattgacgtctttaaaccaaagcctgcaaccattaaaccggtacacccagcgatgcctaagatggtcagaatcatccgtgctttatagcgaaaaagattacgataagttactttttgatggaaactcaatcgccgccagagcggtgtgattctttctaaccaaatccgttggcctggtttcggcgcttttggtcggagtaattgggtgggcttctcgcgtaaatcgcggattaaaacataccccgtggccccaactgtcgcaatcaagaccgctccagtggctaataaaattggaactgtccaaaaatgggttggataatgcgcaaaggtgtagaccggtttttggattcgatagacgactagcggtaataacttcgtgcccaaaatggtgccaagcacggtgccgatactacctgttagtagcgcatatagtaaatacttctgcgcaatttcccaattacgatagcctagtgccttcaatgtcccgatttccttacgattttcttcgatcatccgcgtaatggttgtaaaggtaattagaatcccgattaagaaaaagaagaccggaaagacattccctatcgcatcgatgcgatccgacaagctcgtaaattcattaaaacccggattagcactgcgcgcagttaataagtactgttgctgcggctgagttgtgtgtgcttttaattggcgcatgagctgtgtttctttagtcgcaatgccggtgcgataagcctgtaaaaagctactgtgacgatccaaatcactaaagcgcaccatcatcaccgaatacggttgaggtgcaaatgccttttgtggcaaatacataaagccatctagctgaccatccccgaccggtacggttccacgttcctgacggtcgatatatagcggtgagtccacataaccgaccactttaaaccggtgcgtcaatagctgctgactcttaaccgtcaccctctgccccagacgataatgcgtcttgaccgcgttatccactaaaatttcattcgttcgttgcggatagcgcccggtagtcagcgttaagcgattttgccgtgcagttggttggtaattatataattgtaagttaacatcccgcgcttcatcgcgatacggaatccgataacccaattcagcttggacaccatgcattttttcgaccaccgcacggtcctgttccgttaagccagcggtcccactaatctgtaaatcggatacgcgttgcgtggtgacaaaatgatccacagtctcttctaagttcgggccaatcgatttaatccccacaaacagtaagacacccattaaaataatcaggataatcgcaatgaaccgtccaatcgcctgccgaatatcgcggaatgtggtttgtaaatataaacgtgtctgcatattaaccacctaccattcaatcttttcaactggcaagggattagtgttcacttcaattgaacgcacgcgcgcatcgttaatgtgaatcacgcgatcagccatctgagcaatcgcggcattatgcgtaatcaaaacaacggtccggtgttgttgccgactaacttcttgtaataatttaagaatctgcttgcccgtttcataatcgagtgcgccagttggttcatcacacaagaggagcttcggattcttagcaagcgcccgcgcaatcgccacccgttgttgctccccaccggatagttgggccggaaaattctgaagccgatcctgtagaccaacttgttgcaaaacaagcgcaacatctaaagcattcggcgagacagccgttgccagcgccacattttcttgcgtcgttaaattcggcactaaattgtaaaattggaacacaaacccgacatcagtccggcgaaacgccgtcaattggcgcgcactaaactgcgcaatatcgacaccatcaatcaacacttgcccttcatcgggtgtatccatcccacctaagatgttcagcactgtcgattttcccgcaccactcggtccgagaatcaccgctaactccccttcattgactgtaaaactaatatcatgattggccacgattgttgtctcgcccatctgataccgcttggctacatgtcgtacatcaattaaactcataacgatcactcctatacctatttaaccggttacatttgactagttttattatcgcatatccgagcttgcacgacacaaaaaaaagacaatcagaaaactgattgtcctttaagataagtaccattttttcttaattcaacgtaaagccctgttttttcaaaaaaatcgccactgctggtcgtcgcacttcactaaagaaggccgtattcttggtcgaccaatcagtttgttgctgattggtcccacgattagcataataattttgcatttgttgatcgtattgcactaaattggttgcctgatgcacatcatattgattttgagcgacttgattaacttgcggtaatcgtggtttaacctgatttttagtcttcggaatcccgaccgttaacccaaatagtgggacggtataggcgggcaacccgagtagttcagcgacacgcgcaatgtcattgcgaatcccaccgatataacagatgcctaaatctaacgattcggcagcgactgccatatcctctgctgcaatggctgtgtcgatcgttgcgactaataaggcttccatattttgtatgccagctaatgactggcccgctttttctaagagtgtggcttgtcggtataagtccgcgacgaaaacatagaacgtccccgtctgtttaacgtacgccgcactttgagaaatcgttgcgatttcatcacgaattacgggatcggtcacttcaatgattgaaaatgcctgaacgaaattcgaagaagacccactttgagctgccgcaatgagttgttgtttcactgtcgtgctgaggggtgttggctcgaaatcacgaactgaaacatggtgttgcatttgttcgattaaagatgacatacaaagactccattcgatttaaaataagttgcttctagcatagcgcgttaacacaaaaagggctagcgcaaaattgccctagcccaaaaacgtgctttttgaaactggctcctgtgcttaactacaaaataagcactatggcaaggaccgccatagtgcttatttttaggttaatgctcagaaccaaaccgtttcaaacgcactttgtttgaaacgtgctttttggttgcaacaacttccgcttaagctaaaatccgcagtactcctaaaacctggattactgcggattttgtcttaatgctcagttgctaaccgcaaccaaacgcactctttaccagtggatttcgttaaaaatctttggccctttgcgcatctttgtccgatcatttttagcaacgtcggtctgttttgatctgccgccaccttttttctgatcaattagtgcttgcattttttctttttgcgttaattttggtgtttgtttttcactcatcttctgactcctaacttttctacattctataagattagcatagaattcaaagaatgcctaaccgttattttgtagggccggaatcaagcgctccgtcacttctcgtacagaaaacgggttttgccccgtaatcaactgaccatcctggacagtaaatggtttgtaaaaccgtttttgcacaaattgcgcgccgttttgagttgccacttcttggtttaaaaatggcaccacttttttcttgcccgcaataatttcttctgcagtggtaaacccagtcacttttttaccagcaatcagatactgaccgtcatcatttttaatgcgtagtaaacccgcgatcccgtgacaaacggacgcaagatagccactgtgattataaatttcccgggcaattgcttgtaattctggattatcaggaaaatcccacatcacgccatggccgcccgtatagtaaatcgcagcgtaatcagctggattgatatcgcttggcttgagcgttgcgactaacccccgttgcacgtaatccggttgttcatagatggtcagaattgattcatccgtgtacttcatcccccgtggatcaagcgggacaaagccgcctttaggactgacaaaatcgtaatcaatccccgctttttgcagttcatcaacgaactctgcggattcccccagccataatccggttggatcggtggttccttgataacgcgtaacattcgtatggacaattagtactttgggcatctggttagcctccctaaaaattagtgatgtgggtttattaaatcgttttgttcttattctgtcaattgaaaaataactacttacgtcgtaacaatccaaatagcgttctgaattgatttttaaatgaaacaacatcattgaagatgtcttcgccgtcgttcaacatcttgaccgttaaccagccgagcgcttcggtaatcgacatcgcaacggtcgcattgaccgcggctccggtgaccgttccaacgaccggtatcagttttagaatgttaccgactgcactccgacctaggccaacgagtaccaattctttcgacaggctcttgcccaaactagccgaccaagattgaccgaatagtttatgcaaacgcgccatcatcgttaattgaaccggcaccaacaagaacgcatcggaaaatggaattggtgaacagccaataatcgctgctgttagtgatgctgcgtgaatgatattgtgtgcctttttacgcatctgatcatccacaccgactaggaagtcttcaaagaccccatcaaactgtgtccgactcttcgccatcgtcttttccgccaatgctttggattggttaaaagacttcgcaatcacagctgccgattgttgcggcaacttctttaagacttccgcaaagaaggaatcaaattccggatttggttcaccattcacttgttgcttattaaaaggtttcttcatcatgccacgctccttatctgattgactaacatcgctactttaaagcgattatataatattgaacaacagttagtctatcgagcgaaaggctgactttttaaagaatctcctgaaccccttcttcaatcgtcgtcaccttaaattctgggaaccgtttcttaaacttgtctgaactgaacaggttatcttcttcatatctaggtaggagttcttttaattcctttagcggtttgctgaaccagctaccgatgttgaactgccacatttttaaaacggtgtagtcgattggttgatgcgttaaggtgcctgctagcgcgatgatttcggcgtatgttttaccgtcatcacaagggaggtgccacgtttgaccaaacgcatccagcgtattgccaatcaacgccatcgcacgactagcatctggcgtccaaattaatgtccgaaccgcttgatcattcaatggcacgcgcacctttttgcccgccttgatattgttaaagaccattgtgttcgtaatgctttgcgtcttgcctgggccataaaattcagatgcacgacaaatgaccgcttcaattgcgccagttgccatcttatcaagtaacaactgtgcgatctccgctcggacaaccgctttgcggccaacgggttcaaaaggactcgcttctgtctggagcgtgctatttttcgcatacatataggtattatcgaaaaagacgagcttggccttgtgcgcgacgcacgcgttaatcacgttagtcatcataatgtgaaattgtgcttcccacatgtctgaattcatcggtaagccagcggtaaaataaacaatttcactgcctgcaaccgcacgatcagtttgggcggcgtcgagcaagtttgctggaaatagttgatcgttcgcgttcactttttttggattccgactgaccagtcgaatgtccgttgtgaagtccttatgaagtgccttggctaactcttggccaatctgaccgctactacctaagatggtttgcattttaaaaactccttttactgttgtttttcgatgactgccgtaatctgatccagcagtgtttttagttgattgatttcgcccagttcgtgttgcaagtaataatagttcttcgtgccttcgcgtctaaagtcgaccaagttggcttccttcaacactttcaaatgatgcgacactgccgggcgcgacaagtccgacgccgccattaaatccgtgacctgtaagccatcacaagctttatcagccatcaattctaaaataatactctgccgcttctcatccccaagcgccgtcaaaaacgggctcagctcagcaaagctctgtttaataaccttcatttcatccatacattaatctccggttttattttaatggttcataagtttaaaccattaaaccattgatgtgaatttttgtcaacaacttcaaatcaatgcaacaaaaaaagcctcactcattaactgagtgaggtcattttattaatgattcccttgtgtaatggttgtaatactccccatatcatatcgatgtcgtgtggttgagtattcaaaaggcagcccgttttgtagaaagactgtctgggtaacttgtaagacaggttcgactggtttgcagtgcaggtattcttgatccatttgattcggttgatcggcactaattcgccggtaagccacgccaatctttagatgcaatgtttgttccaagtattcgtagatcgacttcttaagtactgcgtctgttaattcccctaaaatcttagccggcatgatcgaatgctcaatactatagggtacttcgtttaaaaaccggagtcgaacaacgtcatagaccgcttctgttttagctaactgaagcttttcttgttcttctgcatccggtaatcgcaattcattctttagaatgtcactctttactgtggcctttccggcaaacagcttagtcgtccctacatattgattcacagtcgcatctaattgtgatagcgcggagacgtttgatttgataaacgtaccgcgcccttgttcactataaatgagcccttcataagttagcatttcgagtgctttttgaatggtcattctcgatgtttcgaattcttgggctaacttcttctgttcaggaagcggaccatcagctgaatattgtccttctaaaattcgggtgcgaatcgttgtcgcaatatccttatactttgccatagtaaccacctaccatttgatatggttattatagcatattcagattcggaatattcgttgttcaaattataaaatatgactttacaagttacattaaaagcgctatcataaaatcattcaagtgatggaggtaccatgatgacgttagacaaacattttttatggggtaattctgtatcaagtatgcaaagtgaaggtgcctgggatgctgatggtaaaggtttatcagtgtacgatgtgaaacctgagacagctgatttatcggattggaaagtgggaattgatgaattccaccgttatcaagaagatatcgatttaatgcaacagatgggtatgaactgctatcgtttccaaatttcatggacgcgcattttcccaaatggtgatggtgaaattaatttagcgggattcgattattatgatcgattgatatcagctttgctcaaagcgggcatcgaaccgatgatttgcctgtaccattttgacatgcctttgcatcttgctgaaaaatataatggtttctcaagtcggtatgtcacacaagtattcactaagttcgctaaggctgtcattgaccgttatggtggacaagtcaaatattggctaagctttaatgaacaaaatggttttttctttgaacctggctttgataatactggctttatcaacggagagcgcgacttattaaccctttatacgatcgctaataatacaatggttgcgcatgctgaaatcgccaattacttacacgcccactaccctaatgaccaaattggtgggatgttagcctatcaagaattctatcctgcaaccagtcatccccaagatatctttgctgctagaaaagcatcagaatttatcaaccaacatttcgttgacgcctttacaaaaggtcactattcagccgaagtactgcaatatatgcaaaatcatgacttaatgagcagtattcagcctggtgatttagcgctcattgcaagtcatcacaacgacttcttagcgttcagttactactacactgtcgcactcgatcacacaaaattaacacccaacacaccacccaattattacatgcgcgatgcgagtgtccctaatccttatttagaaagtagcgaatggggctggcagattgatgccctcggttttagaaacgtcttaacaaaactttcgaatgaaactggcctccccatcttccccatcgaaaacgggattggcattcgcgaagaatcgctgaatcatgaaatgattcaagatgacgaacggattgcctatcaccgcgaccatatccaggctttgaaagacgcagttgatgaagacggcgctcacgttgtgggctatcttggttgggggttaatcgacatcccaagttcaaaaggtgatatgaataaacgctatggcgtcgtttatgtcaatcgaaccaatcacgacctcaaagaccttgctagaattccgaaggctagtttttattggctgcaaaaagtcattcaatctaacggtgaacaattagactaaaaaaagtgcgttaaaaggagtgttttctatgcttaaacaaggaagtcggcgacaaagatttattgatcagtttacaaatatcgcctttaaaatcgggaatcaagtgcatttgcgttcattacgtgatgccttcgcgattattatgccactattcatcctcgccggaattggggtgctcgtgaataacgttgtattcccttgggtcctccacggccaaatgctaaccaactttcaatacttcggcacttacattaccaatgggactttgaacgttgctgggctattactcgcacctacaatcggctactgtttagcgcgtaataagaattacgtcaacaaaatttccgcggctgtcatggcactagggactttaatcatcatgatgcctaatactgttccggtcacaccactagctgccaaaaaagccgtcgaagtttctggcgtcttaactttccaaaacgtgggaacaaccggaatgtttgccggcattattattggtttagtcgcaacagaactctttatgactctttcaaagcttaaaaaattacagattaacttgagtgatgccgtcccatcagctgttgctggttccttcaacacaatgattccagccctcattacagtgagtctttttgcggcacttgctgcgattttaacggctggtttccacactgatctcatcactttaattacaaatgtgattcaagaaccacttcggcgcgttaatacaagtttaccgggtctccttttgatttacgggactggtaatctcctcttctcatttgggatccatcaagctgtcattaacggtactttattggatccagtcttactgatcaacatgaacaaaaatatggcagcttacgcagctggtcaacacatcccttatatcatcaacaacgttttccgcgatacatttgggatgcttggtggtaccggtagtactatttgtttattgattgcgaccttgctcttctcaaaatcacgcgctagtcgtgatattacaaagctatcattcgtcccaagtttatttaacattaacgaacctgttatttttcggttatccaattgtcttcaactttgcgctcatcattccatttgtcctaatgccaggacttggcatcagtattgcctacttcttcaccgcaattggctggatgaatcgagtagtcgtcatggtaccttggaccacaccaccattactcaactcctatttagcaaccggcggcgattggcgcgcccctgtgattcaaggcttcactttaatcctcggcgttctaatctactggccattcctgaagattagtgaacgcgttgcggccaaacaagctgaattaacgcaataattaaaaaaaagaattcagaattttcgttagaaaattttgaattcttttttgttttaccgatgatcttaacctcccctggtcttataaatccggattaggcgtaatcacttgcaacttatgttctaagagtcgcatctccaatggtgacttggcactcggatcaccatcaatgcgggtttgtgcactttgctgattgtcgactgtgatgctgatttcattcgctttaaagtaagtcatcccgggaatcttcttaaaattacccgttaagaaataagggagaaacatcactgaccgtgctagcgacattttcggcgcaacgaagacatggaaataaccatcatcgggttgcgcttcgggattgaagttggtaaatccaccaacggaattcgtgagggtcaccagcaagaattgcgtgtctttttgccagtgccgatcaggcgtttcaatcgttagcggataatgctgatgctccgctaatgcatggatgcctttgcttaaaaaagctagcggcccccatttttgtttttcactctgagtcacgttcaacgcggcgtccgccaaaatgcccaatgtcattgtactaatcaagtaatcatcgttcacttggccgacgtcgagtgggcgcagatgaacctgctgcagattttcaatcgcttgatcaatgtccaacgggatttgtaacatccgcgccaaattattcacggtcccagcaggtacaatgcctaaataaggcggctgatctaacgtcgcaagaccactaacgacttcattaatggtcccatccccgccgacagcgaccaccacatcaaagcctgcccgcgccgcttttttagctaaccgcgttgcatctttcggcccttccgtcggcatcagttcgaccttgtgttgattcttgatgagtgcctgctcaattttctgaccaaccgactcaccattgttgtgcccagagtggggattataaataacggcataacgatacataaaaaagcctccttcaattactctaagcatagcaaaaatattgggaataggctgggatggcgcattaggcttacacttaaaaagtctgatggtgtcaaaaacaaaaaaacaccccgcaatataaaattgcgaggtacttgtaaacattgatataaaagtgatattaacgtttactgaattgtgaagctttacgagctttcttaagacctggtttcttacgttccttcatacgagggtcacgtgttaacatgccagcgctcttaagagctggacggaagtcagggtcaactgtcaatagggcacgtgaaataccgtgacggattgcaccagcttggcctgagaatccaccaccattaacgtttaccaagatatcatagctatctgttgtttcagtaattgttaaaggttgtttcatatctaaaatcaagttagcaaatggaatgtaatcaacaacgtctttgttgttgatagtgattttaccagtacctggtactaaacgtacacgagctactgagtttttacgacggcctgtaccgttataagttacttgagccactatagtttcctccttaaataatgtccgtaatgtctaagacttctggattttgtgcttggtgtttgtgttcgccaccagcgtatacgtgtaacttcaagaattggttgtgacctaatgagttcttaggtaacatccctttaactgacatttcaattaaacgttctgggttgttttcacgaatttcgccagcagtccgagttttcaaaccaccaggatggttactatggtgatgatataacttgtcggttgctttgcgacctgttaatttaattttttcagcgttgatgacgatgatgttatcacctgtatcaacgttaggtgtaaatgttggtttatttttaccgcgtaagatagaagcgactacagttgatagacgacctaatgcaatatcagttgcatcgatcacataccatttacgttctacttcgcctggtttagccatgtaagttgtacgcacgatttattcctccaatattctgtgtttgtttgacactcaataagtttccggggcctatcgtggggcaaacaataccagatactatagtatcgtaatttcacgattaagtcaattgaatctcaattattttcatcagtttcgtaataaacttttttaaggtacaaaccgcttgctggcgcggttgagcgagcttgttgacggtccttaacttcatacagccgtaaaaaatcgtggacatcccgccgaccgttaccaatttctaataaagttccgaccaagatccgcaccatgttatacaaaaagccgttcccataaaactcaaaaacgagttcattttcgggttcattgaaaacaacggtcgcatcataaatcgtccgcaccttatccttaatgaccccacctgaagccgcaaaactcgtataatcatgcgtgcccatcacatctggcagcgccgcttgaatccgttccacatcgattggatacggataatgaccggtataacgtcgcttgaatggattcgtataatgcccaagatcgacccgatacatataccgtttaccgaccgttgaaaatcgtgcatgaaagtcatcatccgctaactgactatccacaacctccatatcaagcggtaagaggctatttaaggcccgtaacatactaatagcgggtaattgacctggatagtcgaaatggaccacctgccccgttgcatggacacctgcgtccgtccgccctgaaccatacacttgaatataagcacccttactcatctttgtcagtgctttttctaatgtgccctgtactgttcgttggttcggttgcacttggaaacccgcaaaatccgttccatcataggcaattgttacgcgataccgttgtgtcattttatccctcttgtgttaaaaagttagtagttctattctaaataattttctgaaaagtagcaatctttttatgaatgttcgtaaaaaatttgatttaaaaatgcatttttaatataaaacaagttcaaatgctgtataattattattataagtagaaataaggagaattgtgcaatgaagttcggatacgcacgcgtttcatctgccggacaaagtctagcaacccagattagtcaattaaaggaagaaagctgtgacattatctacagcgaaaagtttaccggaactaccgttgatcgccctaatttaatgaactattagatcgggtttcaagtggtgataccatcgttgttacaaaacttgatcgcttcgcaagaaataccaaagaagcacttgaaatcatccaagaactttttaaagcccgcattaaaattcatattttgaacatgggcatcattgaagacaccccttccggacgactcatttttaccttatttagtgcttttgcgcaatttgagcgcgatatgattctcactcgtacccaggaagggaaacataatgctcgtgtcaccaaccctagttacactgaaggtcgtaaaacgacctatactgatgatgaacatacaagcagccctagacatgcgtgaagagggctttacgtacgctcaaattagttaccaaactggcattagtgcttcaacgttgaaacgtcggttcaaaaaacaagctaatcaaaaaagtgcaaaaaaaaaggactcagctaaatcaacctccgttggtttaactgagtcctttttgcgttatcttaagaataaaagtgcgacggttaaaaggcccatcgtgataaatgccacggtgtctcttgtccgccatttcaaaattcggtacttactgcggccttcgccaccttggtacccccgtgcttccattgccgttgctaaatcatccgcgcggttaaaactgctgacaaataacggaattaaaatcggcacgattgctttcatttgttggaataaattcccttcaccaaaatcaaccccacgcgcacgttgcgcatccataatcttagtggtttcatccatcaatgttggtacaaagcgcaatgcaattgatagcatcaatgcaacttcatacactggaaaatggactactttaagcggcttgagaattgattcaatcgcatccgctaacgacaatggcggcgtcgtcaatgtcaggagagtcgacatgaaaataatcaatataaagcgcatgaagatgtagacgccattaatcagcccgtactgggtaagcgtcagaaatccccactgccaatagacatgaccaccacgggtgaagaaaatctgtaagagcactgtaaatagaattagccataacagcggcttaactcctttaataaagaagtcgagtttaatttttgaaatcccgattagcgctaacgtaaagaccagtaataaaacataggcttgccatgtacgcgctaaaaagatgatcccaatataataaaaactggctaataacttcgcccgtggatccatccggtgtaacactgaatcaccggggatatatcggcccagaattaatttattcatgtccaatccccgccttcttcggtagttgttccgctaataaggcggccaattcatgttcggttagtggtacttgatcaaagacaaagccttgtcgcattaaagcttgcgcgaactgagtcgttgttggtaagccaagttgtttttccgttaaccaatccggatccgcaaaaatttcgcgtggtgctccggtcttagctagcttgccatgttccaaaacgataacgttgtcggcgtagttcgccacatcatccatctgatgggtgaccatcacaatcgtcatcccctgctcactgtgtaacttttcaaaaagcgccatcatctcacgccggccaactggatcgagccccgcggttggttcatctaagaccaatacttccggtttcattgccaacacaccagcaatggcaacgcggcgcatttgcccaccagataaatcaaaaggtgacttgtcaatcacattagcgggtaaaccgacgagttcaatcatctctttagcgcgttcaagtgcttcagcttcagggacaccgaagttctgcggaccaaaagcaatatctttttgcaccgtcgactcaaataattggctttcaggaaattgaaaaaccatcccaactttttgacgaacagcctttaagtttttgttgttggtctcaggcgtgatttcgcgctcaccaatctgaacaacgccgctcgttggttttaagagtgcattgaggtgttggagcaatgtcgacttgccactacctgtatgaccaatcaaagccgtataggagccacttggaatggtcacattgatattttctagcccaatcccttgaaaaggcgtgcctggctgataagtgtagcttacatttttgaatgtaatgtccataagtactcaaccatcctttccgttgtgagataatctgtgggcatctcgatagcgcgttcatttagcgctgctttaagtttttctggatatggaacatctagccctaaatcaagcaaacgttgcccatatgcaaaaatatcggccggtgtgccctgatcatgcacttgccccttatctaagataatgatccggtccgcacttgcggcttcgtcaatatcgtgggtaattgatagcacggtcatgtttgtttcttgttttaacttatgaatggttgcgagaacttcttcgcgcccttttggatctagcatactggtggcctcatcgagaatcagaatctcaggttgttgtgcgatgatccctgctaaggccactcgttgtttttggccacccgacaaacggcttggttcacgtttcaagtattcactcataccaacacgttcaaccgcgtctttaacccgttcaatcatttcagctcgcggaatcccctgattttcgagaccaaaagcaacatcgtcttcaaccgttacaccgacaaattgattatccggattctgaaaaaccatgccaattttctggcgaatagtccacacgttatccaacgacaatggtaacccatcaatcgtcactgatcccgattgtaaatctaacaaaccgttcaatgatttcgcgaaggtactcttaccactaccgttatgaccgataatggcgacccattcgccggcattgatactgacagaaagatcattcagtgctaaatgtccttcagattgtgggtattcatattttaaatgttcaacttgaattattttttgctcattcatgattaataacccgtattttccttggaattaaagtgcattggttatgttatccatgcacgtttcaaatcaaaaacctgttcctattttatcatataaaaggccatagcgctttcgttagtcaccctttattcaaaggatatccaacacaaaaaacgtctaactccgatttaactcggaattagacgttattttatgtaaatcatcaatcgatgaaagccatactgtgttgctagtatgaccttaggactagactcggagtacttccatcatcataacgccctgtctcatcgatcaaatgacctaaatcattttgtgattaaacaagttcaataatcaccattaatgcaccgtcaccacgacgaggggctgttttaagaatacgtgtgtaaccaccatttctttcagcataacgtggagcaatgtcactaaataatttttgtaaagcagattgaacgattacagcatcgtcttcttcgcgaatatcagctacttcgttacgaacgaatgctgcagcttgacgacgagcgtgtaaatcaccgcgtttacctaaagtgatcattttttcagttgttttacgaatttctttggcacgagcttctgtagtaatgatacgttcattgatgattaaatcagttgtcaaatcacgtaacattgccttacgttgtgagcttgtgcgacctaatttacgataactcatgaatggagtccctccttcttatcagtttattcttctgtgcgtaagcctaagccaagatcaaataacttgttcttaacttcttctaacgacttgcgaccaagatttctaactttcatcatatctgcttctgatttgtcagttaactcttgaacagtgttgattccagcgcgtttcaaacagttgtatgaacgaactgataaatctaactcttcaattgtcatttcaagcattttctctttatgtgtctcttctttttcgaccatgatttcagcatttttcgcttcatcagtaagatctacaaagattgccaaatgctctgtcataatcttcgcagctaagctaatagcttctctaggactgatggaaccgtttgtccaaacatcaagtgttaacttgtcgaaatcgttacgacgaccaacacgtgtactttctacttgatagttgacacgactgattggggtataaattgagtcgattggcaaaacaccaattggcatatcgtctgacttgttttgatcagcagcaacataaccacggccttttttaactgtcattcgcacgtggaaattgccgccttcagctactgtacaaatatattgatcagtatttaagacttcaacgtcatcatcagaaatgatatcagcagcagtaactgttgccggacccttaacatcgatttcaattgtcttgtcttcttcaacatgcaatttaagtgctaattttttaatattcaagatgatttgtgttacgtcttctaggacgccatcaattgttgaaaattcatgtaaaacaccatcaatttgaatatctgtgacagcagtacctggtaaagaagcgagtaaaatacgacgtaaagagttacctaaagtcgtaccatagccacgttcaagtggttctacaacgaacttaccgtagttagtactttcatcaacctttgtaatgtttggtttttcaaattcgatcattcttatcttttacccctttcaaaacgagaagtgtttatacgtgaacacgtttcagtttgtctcaaaatgaagcgtagcccagactaaacacgacggcgttttggaggacgagatccattatgaggaactggtgtaacgtcacgaatagcagtaacttctaaaccagttgcttgtaatgagcgaattgcagcttcacggccagaacctggtcctttaacagcaacttcaacagatttcataccatgttccatggcttctttaccagcagcttctgcagccatttgagcagcaaaaggtgttgacttacgactacctttgaaacctaatgaaccagcagatgaccatgcaacagcattcccatgaggatcagtgatcatcacaagagtattgttaaatgttgagtgaatatgtgcaacgccggcttcgatatttttcttcacacgacgcttacgtggagcatttttcttgtttgccataaattataacctccttttactgattatttcttcttgcctgcaatcgtaactttcttacctttacgagtacgtgcgttgttcttcgtgttttgaccacgaactggtaatccacgacgatgacgcatgccacgataagaaccgatttcttgtagacgtttgatgtttaagctaacttcacgacgaagatcgccttcaactttaactttgtcgattgctgcacggatcttgtcttcttgatccggcgttaaatcacgagtacggacgtcttctgcgacgccagcatcagccaagactttaacggcagttgtatttccgataccgaaaatataagttaaagcaatcacaatttgtttatcacgtggtaaatccacacctgcgatacgtgccattcttgcacctcctgcttaattaatattaaccttgacgttgtttatgttttgggttagctgcgcagataatcataacgcggccttttcgtttgataactttacaatgttcgcacattggttttactgatggtcttactttcatatcgactgacctccttgatatgatccttacgcctatttaaagcgatacgtaattcgtcccttagtcaaatcatagggtgacaattcaactgtcacacggtctccaggtaaaatcttgatgtagttcttacggattttaccagaaacgtgtgccagaataactgcaccattttcaagttctactttaaacattgcatttggtaaagtatcagttactttaccttcaatttcaatgacgtcatcttttgccacgcaaaagtacccccttgtggttgtgaaaattcatacagaaaaatggtgagagctctccgcactcaccgctagtggtcataccgagatattatatcacaagtattaaatttttaaaagcactgagaattctgtcattaaacaactagtcaggcttttacgtgaacaatgaccgtgagatcacttgagttgatgactagtctttaatggtatcaagtactttttgaacggcagagaacacatcatcaatttcttgattcccatccaccgtgtaaagtaggttacgtttttcataataatcaagtaaaggtgtattcatttcgatattgacctttaagcgattcttaaccgtttcaggtttgtcgtcttctcgttggaagaaaacatgttcgccgcaacgatcacatgtaccttccactttagttggatggtaaagtttgtggtacgttgcaccacaatttttacaaataaagcggccagataaacgatcagccaagatttcaggatcaacatcaatgttaatcacaccatctaaaggtttgttcaatttatcagtaatggcagctaaagcatccgcctgatcaagagtccgaggaaaaccatcaaggagataacctacattagtatctgcttgtgcaagacgttcctcaacaattccgttggtcacatcatctggtaccaattcacctttatcgatgaatgacttagctttaaccccaagttctgtttgatctgccatagcagctctgaacatgtcaccagttgaaatgtgtggaatatgataagcgtcaacaatcttttcagcttgcgttcccttaccagcgccgggaagtcccattaacatgagattcatgcctttgcctcctatttaaaaccaggattcaatactttttaaacgataattgcttatcgaatgaatccaacatacttgcgtttcataagtaacccttcgagttgacgtgtgctttcaagcgcaacaccaacaacgattagtaaactcgtcccacccaaaccaattgattggggtaagccaccgaggtttgctgctaattgtggtaataatgcaattaccccaaggaacaacgcaccgacagttgaaagacgcattaatacgctagaaagatacttctcggtacctttacctggccaaacacctgggatataactcccttgcttagtcaagttctccgcaactttttcagggttaacctgaacaaaagcatagaagaaggtaaagagaacaatgagcaccgtataaacaatcgaacctgtcacagtctgcatgctgaagatatctgataatactttaaaccaagtatctgcaccatgacctgattggaaggccattaagattgtttgaggtgtcataataaatgaactggcgaagataaccggaatcacaccagcgacgttaactttaaggggtaggtaactattttcacctgcaccagcttcacgacgcgtatattgaatcggaatctttcgatttgcttgttggacccatgtcacaaatgtgacaatcacgagtactgcaataatcaaaccgatgatgaataagacacctttccacatatcgccttttgaagcgttcaagacttgttcgcggaagatttggtaaagaccgcttggaaggcgtgcaatgatccctgcaaagatgatcattgacacaccattccctaagcctttatccgttatctgttcacccaaccatgtaattaacatcgtaccacccgttaaaatgatcccgatgctaacgaaggtcttaatccccggatctttaaccaagcccatttgactgagtgagttaaagccagcggtaatccctatcgattggataaacgctaagatgatggttaagtaacgcgttacttggttaagcttacgtcgcccaacttcaccttgcttgctccattcaacaaacttaggcacaatatccatttgtagtaattgaaccacaatttgggcagtgatgaatggtgaaacccccatcgagaagatggaatagttcgccaagccaccaccacttacggtatcaagcaatgggatcaaaccagttgaacccaacttagtcaatgcaccagcattcacacctggtaccgtaatttgtgcacctaaacgataaacgatcaaaacgcctaaagtaaacaaaatcttactacggatttcctttactttaaatgcgtttttgagtgtctttagcaattaaatcacctcaattgaaccgccagcagcttctacagcagcttttgcagcttcagaatacttgcttaccttaatgttcaattttttgtttaattcaccattcgctaataatttaacacctgataattcattcttaacaacgcctgcttcgattaaaacagttgaagtaatttctgcaccgtcttcaaaacgatttaaatcgtttaagttgacaacagcatattccttacggttgatattcttgaatccacgttttggcatacgacggaataaaggcatttgtccaccttcaaatcctaaacgtactttactacgagctttttggcctttttgaccacgaccagcagttttaccagtacctgaagaagtaccacggccgacacgtttacgaacgtcacgagcaccttcgttaggtttcatttcatgtaatttcattattgtgcgcacctccttgcaatatatgttgaaattagtctttaatttcttcgactgttactaaatgtgcgagtttgaaaatcacaccgcgagttgcagcatcatctggtttgattacagaactatttactcggttcaagccaaattctttgaccattttacgttgttctggaagacgatgagcagcactttttcttaaagtaatctttaatttagccatgttcagttatcctcctagttttgtaagctttctacagatacattacgtaattctgcaatttcttcagcagtcttcatacgagttaaaccgtcaattgtggcacggataacattgatagcagttttgctacctaatgttttacttgtcacatcatcgattcctgctaattccatgacggcacgaacagcaccaccggcagcaataccagaaccttcaacagctggttttaatagaacacgaccagcgccgaagcgaccaataatttcatgaggtaatgttgttccgaccttaggaacattgataagattctttttagcgtcttcaacggctttacggatagcttcaggaacttcttgtgctttacctgtcccgaaacctacgtgaccgtctttatcaccaacgattacgattgctgcgaaacgtagacgacgtccacctttaacaacttttgtaacacggttgattgaaacaacgcgatcttctaaatctaaatgagttggatcaatgtaagtcataaatggttttcctccttattagaattctagtccgttttcacgagcagctgtagctaaagcttcgatacgaccgtggtataagtaaccgccacgatcaaaaacaacaactttatggccggctttaacagcgcgttgtgcaactaatgcgccaacttgttgtgcttgttctactttagtaccttctgcttttacttctttatctaatgttgaggcacttgctagcgtcacacccgctacgtcatcaataagttgagcgtagatgtttttgttagaacggaaaacgttcaagcgtgggcagtcagcagtaccagagatcttgccacgaacgcgtgtatggcgtttttgacgtgtcttattcttgtctggttttgtaatcacaattttcacctcttaatatcgtttaacagctcaggctgctttatttaccagttttaccttctttacggcgaacatattcatcagtataacgaatacctttacctttgtaaggttctggaggacgaacatcacggatttcagctgcgaattggccaacttgttgtttgctaataccgctgatgatgatgtttgtgtttgatgggacttcgactgtaacaccttctggggcttccatttcaactggatgtgaatacccaacgttcaatactaaagtcttgcctttcaattgagcacggtaaccaacaccgataagatccaatgtcttcttgaaaccttccgttacgcccaagatcatgttgtttaagttagcacgcatagtaccgtgcattgcacgatcactttcactattacgtgtaaagttgataaggttaccttcttcgtgcatttcaatcactggactgaaatgacgtgttagttcacctttaggtcccttaactgtgatgttttcaccgtctttagtaacggtaacacctgcaggaacttcgattacttttaatccgatacgactcacgttatgacacctccttattttaagtttagattaccaaacgtatgcgagaacttcgccgccggcagccttttcacgagcttctttgtcagttacgacaccgttgcttgttgagataattgcgatgcctaagccgtttaataccttaggaacatcattagctttaacgtaattacgtaaaccaggttttgaaatccgtttcaaaccagagataacacgttcgttattcttaccatatttcaagaatacacggatgataccttgtttgtcgtcttcaatcacttcgtaatcgcggataaagccttcgcgtttcaaaatttcagaaatttcttttttcatacgtgaagcagggacttctaatgattcgtgatgtaccatgttggcattacgaatacgtgttagatagtctgcgattggatctgtcatgaccatgtggaattaacctccttattgactctttataattaccagcttgcttttttcatgcctggaatttggcccttatgagctaattcacggaggcaaacccggcaaagcttaaacttacgatatacagaatgtggacgtccacaacgttcgcaacgtgaatattcttgtgttgaaaattttgctggacgatgattctttacaactaaagattttttagccaagaaattgacctccctttttatttagcaaatggcatgccaaattgtgttaacaattcgcgtgcttcttcgtcagtatttgaagttgttacaataacaacatccaaaccacgaacgcgatctaccttatcataatcgatttcagggaagatcaattgttcgcgtacacctaatgtataattaccgcgaccatcgaatgattttgcactaacaccgtgaaaatcacgaacacgaggtaaagatacgttaactaatttatctaagaaatcgtacattctttcgccacgtaaagttactttagcgccgattggcataccttcacgtaaacggaaaccagcgattgatttcttagcttttgtgattaatggtttttgaccagcaatcaaacctaattcttcaacagctttatccaaattcttagcgtttgaaacagcatcaccaacacccatgttaagtacgatcttttcgatcttaggtacttgcatgcttgatgtgtagttgaacttttcgatcaacgctggtgtcatttctttaacatatttttcttttaaacggttagtcatgtaaaaagtgcctcctttccccaaaagattatttatcgattgattctccagttttctttgaaacgcgtactttcttaccatcaatcactttgaaacctacacgagtagcttcgttgtttgatggatcaattagcataacgtttgaagcatcgatacttgcctctgtgtcaacaatcccaccattagggttttgagcatttggcttaacatgctttttaatggtattgataccttcaacaacaacacggccttctttaggcatagctttgatgattgtaccttctttacctttatctttaccactgattactttaactttatcaccagttttaacgaacattgatatacgcacctccttggttgtctgtaattatagaacttcaggcgctaaggaaacgatcttcatgaaatcactgtcacgcaattcacgtgcaactggcccgaagatacgtgttccttttggagtcttgtcatcattgatgataacagcagcgttttcgtcgaacttgatgtaagaaccgtctgcacgacgagcacctgacttagtacgaacgataacagctttgacaacttcaccttttttgacaacgccacctggtgttgcctgtttaattgttgcaacgataacatcaccgatgttagcagtcttgcgacctgaaccacccaaaactttaatagttaaaatttcgcgggcaccggagttatcagcaaccttaagacgactttctgattgaatcacttataggtcctccttccgtcacttatatatatattgagtaacgatttagataataactgctttttcaacgacatctaataaacggaaccgttttgtacgtgacaaaggacgagtttccataacacgcacaacgtcgccaacttttgcttcgttgttgtcatcttgtgcataatatttctttgaatatctaacacgtttaccatattcaggatgtgttttataagtttcaaccacgacagtaattgttttatccattttgtctgaaacaacacggccttggtacactttacgatggttacgactttcttcgctcaaagtaaatagctcctttccatttattatttgttaagttcttgttgacgtaatacagttttaatccgtgcaatgttctgacgaacttgctttaagcgggcggtattttctaattgaccggtagcttgttggaaacgaagattgaataattcttctttgtattggtgttctttttcaagcatttcagcagtggttaattcaataatatctttagccttcatttgactcgccacctacttcctcgcgttttacgatcttagttttaactggcaatttatgtgatgccaagcgtaatgcttcacgagcaacttcttcagaaacgccgccgatttcaaacatgactttttcacgttttactacagcaacccatccagcaggagcacccttacctgaacccattcgaacgccgacaccttttgcagtgtatgatttgtgagggaaaattttaatccacactttcccaccacgtttcatgtaacgagtcatggcaacacgagcagcttcgatttgacggttggtaatccaacttgattctaaagcttgtagcccgaattcaccaaaagtgacttctttgccaccttttgcagcaccgcgcatcttcccacggaattcacgacgatgttttacacgtttaggtactaacatgtttatttccctcctttcgtattgttgttggctttagcgggtaatacttcgccccgataaatccaagtcttaactcctaatttaccgtaagtagtcatggcttcgtcccatgaataatcgatgtctgcacgtagcgtatgcaaaggaacagttccttgagcatgtgtttcgacacgagacatgtcagcaccgttcaaacggccggcaacttgagttttaatacccttagcaccagcgcgcattgtacgttgcatagcttggcgttgagcgcgacggaaagcaacacgtgcttccaattgacgagcaatgccttcacctactaagtgagcgtctaaatcaggtttcttgatttccacaatgttgatgtgtactttcttacctgttaagttgtttaattctttacgtagattttctacttcagaaccgcctttaccgatgaccataccaggtttagcagtatggattgaaacgttcacgcgatttgcagcgcgttcgatttcaatagtagagacagatgcgtcagctaattttgtgttgatatatttacgaatcttaagatcttcgtgtaagaatgttgcgaaatctttttctgcataccatttagcgtcccaatcacggatgacgccaacacgaaaaccggttggattaatcttttgacccacgcgatatccctccttatgcttctttttctgatacaactacagtgatgtgacttgtacgtttgttgattggtgatgctgagcctttagcgcgaggacgaaaacgtttcaatgttggtccttcgttagcataagcttctgtaacgaccaagttttctgcatctaagtcgtaattatgttctgcattagcgatagctgatttcaaaactttgattacgactggtgaagcagctcttggtgtaaattctaagattgcaattgcttctgcaacgctcttgcctctaatcaagtcgactaccatccgtactttacgggctgccatccgaactgattttgcgctagctgttgcactagtaatttgatctgccattgagattcatcctcctttctagcgtgcttttgttttcttatcgtcatttccatgaccatggaaagttcttgttggtacgaattcacctaatttatggcctaccatatcgtctgagatgaaaacgggaacgtgtttccgtccgtcataaacagcgattgtgtagccaataaagctagggaaaattgtcgagcgacgggaccaagtcttgatgacttgtttcttttcgctatcggcttgtgcttcaatcttgttgagcaagtgtgcgtctgcgaatggtccttttttcaaactacgactcattatgaaacctccttcgaataaaaagttcaatgtgacttatgtttaagccgcattggctttagacatgttcaattggaattgattatcttgatttacgatgacgaataataagtttctctgaacgagccttactactacgagtcttcttaccaagcgtcttcttaccccatggagacataggagaaggacgaccgattggagctttaccttcaccaccaccatgaggatgatcattagggttcattactgacccacgaactgtaggacggatacccatccaacgtttacggccagctttaccaatcttgattaattcgtgttgaccgttaccaacagtaccgatcgttgcacgacatgtaagtaggatcatacgtgtttcgccagaagttaaacgaacgatagcgtatttgccttctttacctaataattgagctgatgtaccagctgaacgaaccaattggccgcctttaccaggttttaattcgatattgtggataagtgtaccatcaggaatattagctaatggtaatgcgttacctactttaatatcggcatccacaccagattcaacaaccatgcctacttcaagacctttaggggcgatgatgtatgctttgataccatctggatattggattaatgcaatatttgaagttctgtttggatcgtattcaattgacttaacagtcgctttgataccatctttgatacgtttgaagtcgatgacacggtatttttgcttatgaccgccgccacgatgacgaacagtgatatgaccatgtgcattacgaccagcagtatggctttgggattccaacaacgtcttttcaggggttgtctttgtgatctcagcaaaatctgagctggtcatattacgacgaccatttgtggttggtttgtacttaataattcccacgtgtataccctcctataattattctatttaagtgttgcttaatcttcgaaaatcttgatttcttttgaatcagcagttaaagtaacgattgctttacggcgttttttagtatagccagcatagcgaccttgacgttttaacttgccacgaacgttcatgatgtttacgtttttaacgtttacaccaaagatttcttcgattgcgtaacgcacttgtgttttgttggcacgaacatcaacatcaaatgtgtatttcttgtcgtccattgcagccattgaattttcagtaactactgggcgtaaaataacatcgcgtgcttccattatgcaagcacctcctcaattttagaaagagcagcttgagtaaggattaatttttggttgccaacaacgtctaatacgttgataccatcagcagctacaacagttacattaggtaagttgcgagctgataatgcagcaaaatcatttccgtcttcaagtactaccaatgctttagtattaacgtctaacttgttaagtacttcagcgaattctttagtcttaggtgcgtcaaagttgaatgcatctacaacaactaaatcattgtcgataaccttttgtgaaagtactgacttgattgcaagacgacgtactttacgaggtaatttgtagctgtatgaacgaggtgtaggaccaaatacggtaccaccaccacgccattgaggtgaacggattgagccttgacgagcacgacctgtacctttttgacgccaaggtttacgaccaccaccacgaacagctgatctgttcttaacagcgtgtgttccttgtcttaatgaagcacgttgcatgatgattgcatcaaacacaacgttttcgttaggttcgatagcccagattgagtcgtttaattcaacgttcccattttggctaccatcttgtttaaataatgttacgtttgccattggtaaaatcctcccttctcagattatttgttacgagctttaacagctgttttgattgtaatcattgagtttttagcacctggcacgttacctttaacaaggataacgttcttttcaacatctgtacttacaaccacaaggttttgaacagtacgttggttgttacccatgcgtccaggtaataatttacccttgaagacacggttgataacagcacccattgaaccaggacgacggtggtaacgagaaccgtgacccataggcccacgtgattgtccgtcttttttaatgttaccttggaaaccatgacctttcgttacaccagtaacgtcaacgacgtcgccggctgcgaaagtatcaactttgatttctgttcctacttcgtaatctcctaatgcgacatctctgaattctctaatgaagcgcttaggagtagtatttgcttttgctacatgacctttagcaggtttgtttgacaagacttcacgtttatcttcaaaaccaacttggatggcttcatagccgtctgtttcgtttgttttaacttgtaaaacaacgtttggagttgctttgataactgttacgggaattaattcgccgttttcagtaaagacttgtgtcatacctacttttctacctaagattccttttgtggtcatggtaacacctcttttctagtatttttaattggttggtacgaattaaagcttgatttcgatatctacaccacttggtaagtcaagtttcatcaatgaatcaactgtcttaggtgtagggttaacaatatcgattaaacgtttgtgtgtacgcatttcgaattgttcacgtgaatctttatgcttatgtggtgaacgaagcactgtataaagtgttctttcagttggtaatgggattgggccagagatagtagcacctgttctctttgctgtttccacaatcttgtcagctgattgatccaaaatacggtgttcgaatgctttcaaacgaatacgaatcttttgttttgccatgtttttccctccttcgtctattttaaaagtagactagctccgtgaaaatttttccggcacgcccgcccatggcaaagcggccgggtgtgtcgcaacctctcacatcttagctactcggtaatctttttgactaccatggtgcgcactcctgctatggaaatagcactttatctatcttacaagatacaacccgataacgcaacccttttttgctgatttatcaaagtttttcataacattttcataaatcttgtagcaagcgtcattcgtggatttctagccatgttttgatacactgaaagcaacttaaatcccctccaggaggtccttatcatgtcccataacgcacttttgattatcgactatacaaatgacttcgttgacccaaacggtgctctgacagccggcaaacccgctcagaaaatcgttcctgtaattatcgaattagctaaccagttcctagcagccggtgattacgtcatcttaccgactgatttacacgtcaaggatgatccatttcatccagagagcgccctattcccaccacataatctagccaatacttggggccatgagttttacggaccactagctagctggtacaccaagcaccaaaccgatcctcacgtctatgcatttgcaaagaatcgctattcagcatttgctaacactaatctggataatttcttacgcgagcgcgagattgacgcgttaacactgactggcgtttgcaccgacatttgcgtgctccacactgcagtctcggcatacaacttaaattacccactaacaattccagccgctgctgtcgcaacttttacaccgaacgggcaagaatgggcactcgcgcattttaaaaacagcctcggagctacaattatctaatttgacttttaacgatcatctgttatcttaaatgacgggacaatgtacccattctatataaaggagattctttttatgttaaaaacaaacacagcaattgtgctatcaatggcggtattcgctgcttagatagccagtgccgccattatttcatttagatcatcatgaaataacacactggaggcgcatcatcatgcaaacacaacaaacagcttttttaatttttcaaagccaaggccattacaaagtcctactcaatcatcaagaattaaccgcaacaatcagcggtcggtatcgccacttggcagaaagcactaacgacctgcccgttgtcggtgatcaagtaaccggcgtgatctatgatacggattatttccaaatccaaggacatctcccccggcacacgcttattcaacgacacaacagtaataagcaacaacggattcaaactttagcggccaatattgcaacgattttcatcgtaacatccgccaatcaagaattcagcgaagcgcgcttacaacgctatttaacgatggcttgggatagcggcgcaacaccggtgattgttttgagtaaaaccgatttagtcagcgactctgagctaacaacctttcttgacgccatcgcaagtgtgacattcgacagcgttcccgtcatcacaactggccagacggcatcaaatgttgcagcgactttcaaaccgtatttaacagctggacaatgggtgacatttgtcggctcatccggcgttggtaaatcaaccctgatcaaccagctcattaaagagccttccgttttaacgagcggcattcgcgctgacgatgataaggggcgccacacaaccaccaatcgacaagcctgtcaaactgctagcggggccttcatcgtcgatactcctggcatgcgcgaactcggcatgacaagtagcatgtctaaggcactcaagacagtctttactgatattgagacgctcgcacaggactgtcgatttaaggattgccagcatcaaagcgaacccggttgcgccgtacgagccgcaatcgatgcaggttcattaatgcctgaacggctagctgatttcaataaactggctatcgaagcggactatagtcaactatccgcccgcgaaatcgaacaagcaaaggttaaacgtctgatgggcagtttgaaaacacgtcctacaaaacaaaactaactcagtaagccgtgcctagaaacacaaaaagggagttacgacaaaagtgatttttgtcgtaactcccttttttggagaagtttatatgaaaaagagtttgagtttttttgccagggcggtggcaaatcgagttagcggggattgaacccgcatgaaccagtcttaatgatcaacaaatccttgcgccttcgaaagcaagtctctatcaatcaccagaaaaccattcactgttcttgggaggaatttcaaatgggccggttcgttttaccattaaactataactcattggtggtgctttacttagacggattctttagggaggaattgtctaatgaaaattcatttaatcttgcttttcaaggtaactttttccgcctaactacgcgaagacaacgatcaccttcgttgctcattatcctcgctatgttatgctcaaaagctaaccaccttgaaaagcatttttaccttttcagattatttcttgggaggaattcatctgatgtatacagaataccaaccagttatgaattaaatatgaactttcatttacgaaactgtaaaatcgcatttttacgcacaaaaaaaggactcgtcgcaatgacgagtccttttccaatcgaaaccaatcacttaagattagcggcttattggccaccgttcttcttgatgatttcttcttggatgctcttaggaacagctgagtagtggtcaaataccattgtaaatgtcccacgaccttgtgtagctgaacgtaatgttgtcgcataaccaaacatttctgacaatggtaccattgcattaacgatttgggcattaccacgtgcttccataccttcaacagcaccacgacgagcagttacttgtcccatgatatcgccaagatattcttcaggagcaataacttcaaccttcatgataggttcaaggatttcagcgccagcttgtttagcagcgttcttcaatgccattgatgcagcaatcttaaatgctgattcattagaatcgacatcatgataactaccatcatataacttagctttaacgtcaatcaatgggtaaccagctaagacaccgtttgccattgattctttcaagccttgttcaactgatgggatgtattcacgaggaaccacaccaccgacgatagcgtcttcgaattcgaagcctttaccttcttcgttaggtgtaaattcaacccaaacatcaccatattgacctttaccaccggattgacgaacgaatttaccttgtgcagatgcttgttttgtgaatgtttcacggtaagcaacttgaggttcaccaattttggcaaccactttaaattcacgtctcatacgatcaaccatgatatccaaatgcaattcacccatcccagaaataagcgtttcgcctgtttcattgttggtttcagccttgaatgtaggatcttcttcagcaagtttttgtaaagcaagatctaacttatcacgatcttcttttgattcaggttcaacagaaacttggataactgggtcagggaattccattgattccaagattaatggatgatcaacgtcagtcaatgaatcaccagttgttgtattcttcaaaccgattgcagcagcgatatccccagagaatacttcaggaatttcgttacggtgatttgaatgcatttgtaataaacgaccaacacgttcacgtttgtctttagttgcattcaaaatgtatgaaccagattgtaatgtaccagtataaacacggaagaatgttaaacgaccaacgaatgggtcagtagcaatcttaaatgctaaaccagcaaatggtttgtcatcgccagccatcaattcaacttctgaatcatcttctgggtttttagcgttataaggacgtacgtctaatggtgatggtaagtaatctacaacaccatccattaacatttgaacacctttatttttgaaagctgaaccagcgaaaactgggaagaatttcaaatcgatagttgcttgacgaatagcagctttcaattcatctttagaaatttcttcgccttctaaatatttgtccataatgtcgtcattaacatcagcaacagcttcaactaattcggcacgacgttttgtagcttcttcaaggtagtcagcaggtacatcaactgtatcccacttagcacctaattcatcttcatcatagatgtcagcttgcatttcgatcaaatcaataacgccttggaattcatcttcagcgccgattggcatttgaacagcatgtgcattagcttgtaaacgatcttccaatgttgtcattgagtaatcgaagttagcaccaagtttgtccatcttgttaacgaaaacaatccggggaacaccataagtagttgcttgacgccaaacattttcagtttgaggttcaacacctgattgagcatctaagacagtgattgcaccatctaaaacacgcaatgaacgttcaacttcgattgtgaaatcaacgtgtcctggtgtatcaatgatattaactcggttacctttccattcagctgttgtagcagctgatgtaattgtaatcccacgttcttgttcttgttccatccagtccatttgtgaagccccttcgtgggtttcaccgatcttatggattttaccagtgtagtacaagatacgttctgtggttgttgtcttaccagcatcaatatgagccatgataccgatattacgcgttttgtctaacggaaattcacgtttgtttgccataagtgaatattactcctctcgaatattaagctatatacaacaagaggccattatatgatttgaatacatataacagccaaccttgttaatcttaccagcgataatgtgcaaatgcgcggttggcatcagccattttatgtgtatcttcacgtttcttaactgcagcaccagtgttattggcagcatccatgatttcacgtgcaagacgttgatccatggtatgttccccacgtaggcgagcatagcttactaaccagcgtaaacctaaagttgtacgacgttctggacgaacttcaattggtacttggtagttagaaccaccgatacggcgagctttaacttcaagtactggcatgatgttgttcatagcttcttcgaacacttctaatggttcattaccagtttcttctttaataatatcaaatgcatcgtataagattgttgacgcagtaccacgtttaccatcaaccattaagcggttgattaagcgtgaaaccaatttagaattgtacattggatcaggtaaaacgtcacgttttgcaacatagccttttcttggcatcctgataacctcctcaagatatttaagtccttgaagtaacacacagtgtcatttaaacttcaatcgactttttcaaatttttttgtgtgttattttttaggtctcttagtaccatacttagaacggctttgcatacgaccgtcaacaccggcagtatctaaagcaccacggataacgtgataacgtaccccaggtaaatccttaacacggcccccacggataagaacaacactatgttcttgtaggttatgaccaataccaggaatataagctgtaacttcgattaagttagataaacgcacacgcgcatacttacgtaaagcagagttaggctttttaggtgtcatagtacccacacgagtagcaaccccacgtttttgtggtgctggattatctgtagcttttttcttcatactgttgtagccaaagtttaatgcaggtgcatcagactttgaagttcttgatttacgacccttacgtaccaattggttaattgttggcatttgaaggttcctccttccttgatctgaaagttatttttgagttttaagtccacacatccaggtggttctttttttacgataaaaaaatggcaacctagattgcgtggattgtaatgcatttttagacgtcagtcagcatgtctgaatatcagaaaacttccgtaaaaagcacatctacaagaatagcatgcacaactacgaaagtcaacgtgctataagccagtttttcagaaaaagttgcgccctttttttgtagttatcataaaggagatgacacgtttgttaatatattttttaacctttgttattggcgcgtgttgcgcctcttttttaactgtttgtgcttggcgttggccactcggtttatccatcacatggcctggttcacggtgtgacttctgccatcacgccctcgcttggtacgacttatgtccaattatcagttacctcattctcagagggcactgccgctattgtgatactcgaatccagcaccatttttttactagtgaggttattggcggcttgttagcgtgttgtttagccagtcaatatttcacaccacagattggctatttattgcttatcctttatttgttgagcctagtcgatattttccatacagctctatacccagttccaatggtactggcttttatgcctttgtttattgactactggccgacaaaccattggctcagtgccctattgattggcagcaccttatctgtcatcaactacttttcagatggcatcggtactggtgacattgaattattggcaattcttgggttgtggtttggattggaggtcaccctatccatgttattaattgcctgtctcctctgtttaatcaaatatctcattgatagtctccaccatccagttgtcctcgccttagtcggacgccgcccaattccatttgtcccgtatatcagctacggtgtcttaatcgttttgtttattgcaaacacataaaaaagggcctcaccatgtcggtgaggccctttaacgtgcaatttagagcaactgttctaaattggcactcagttattcttttgtttcttctttcatctgtgcttcgatgtcactgattgagtagacattttctgatacagcgccgactgtcttaggttccatatgacgatacttcgccataccagtaccagctgggacaatcttaccgatgataacattttctttcaaaccaagtaatggatcgctcttaccgcggatagaagcatccgttaagacacgtgttgtctcttggaatgatgcggctgataagaaactatttgtttccaatgatgctttcgtaataccaagcaagacaggacgacaagtagcaggtacgccaccgctaattaaggtttcgtggttacggtctgtaaattcactaatatccattaatgtaccaggtaagatttctgtatcacccggatccatgacacggactttacgtagcatttgacggaccataacttcaacgtgtttatcgccgatttcaacaccttgcatacggtaaactttttgaacttcatgcaagaggtagttttcagttgataagacgtcacggactttaattaattgtttaggatcaacagaaccacccgttaacttagaaccacgacgaaccatgtcgccttcgttaacgatgacgttggctgtgtaaggcacactatatgaacgtgtatctgtttcaccttgaacagtgatttcacgtgtatgttctgcagggttttcttccaccgcaacaacttcaccagttacttcagtgattgttgcaagccccttaggattacgcgcttcgaaaatttcttggatacgaggcaaaccttgagtgatatcttcaccgccggcaaccccaccggtatggaagttacgcatggttaattgcgtaccaggttcaccgattgattgagctgcgactgttccgactgcttcaccaacttcaacttcttcgccgttggccatgttacgaccgtaacattttttgcagacaccgtgttttgtgttacatgtgaagacagaacgaattgtgacttcttcaacaccggcatcaacaacagcttgagcaagttgttcatccattaattggttacgttgaaccatcacttcacccgttgttgggttaacaatggtcttcattgcgcaacgaccaacaagacggtcatacaatggttcgattaattcattaccttcgcgaattgagtgaatgagaagaccacgatcagtcccacaatcttcttcacgaatgataacgtcttgagcaacatcaactaaacgacgtgttaagtaaccagaatcggcagtcttaagcgccgtatcagtcatccctttacgggcaccatgggtagacataaacatttccatgacagagaggccttcacggaagtttgatgtaacaggaacttccatcatcccaccattaggagcagccatcaacccacgcataccagcaagttgcgtaaagttagagatgttaccacgggcaccagaatcagacatcattgagattgggtttgttggatcaaacgaatctgtgagtcgttgttggatatcgtctttagcatcgttccagatttcaataacgcgcgcatggcgttcttcatctgtaatcaacccacgacggaattgtttagaaaccgttgtgactttcttatgggcttcatcaacaatttcttgtttttcaggtaattgaggaacatcggcaaccccaactgttaaaccagcatgggtcgcttgaacgtaacctaaggtcttcatatcatccaataagtcagatgtccgttgaaccttatataccttgaagacttgcgcgatgatatcacttaagaagcctttcttaaatggtaagatcactggggcacttgagaggtagtcatgaatatcttcaccgttatcgatgaagtatttatctggcacaccattcatcaagttatctgttgttggttcgttcaaatatgggaagccagttggcatgatttcgttgaacatcactttaccaacacttgttaccataatcttgtggcgttgttcgtcagggaatggacgattatccatatcaacaactgacaaaccaatccgactgtgcaaatgaacgtgacctgtttgataagccattaaaacttcgtttgtatctttgaagatcatgccttcgccgagactacctttttgttcaagcgttaagtagtagttccctaaaacaacgtcttgagaaggtgtaacgattggtttaccatcttttggtgccaaaatatggtgagcggcaagcattaacattcttgcttctgcttgtgcttcatcagataaaggtacgtggatcgccatttgatccccatcgaaatcggcattgtaagcttcacaagctaatggatgaagacggattgacttaccatcaaccaggattggttcgaatgcttggataccaagtctatgcaatgtaggtgctcggttcaatagaactgggcgttccttgatgacatcttctaaaacatcccaaacatcgtcatcttgacgatcaattttacgttttgcatttttaatgtttgaagccatatcgcgtttcactaattcgtgcatgacgaatggtttgaacaattcaagtgccatttcacgtggtaatccacattgatagaacttcaatgtaggaccaacatcgataacggaacgaccagaataatcgacacgtttaccaagtaagttttgacggaaacgaccttgtttccctttcaacatgtgtgaaagagacttcaatggacggttaccaggtccagtaactggacggccacgacgaccattatcaatcaaagcatcaacggcttcttgtaacatccgtttttcgttttgaacgatgatgcttggtgccatcaagtctaacaagcgtttcaaacggttgttacggttgatcacacgacggtacaaatcattcaaatcagatgtggcaaaacggccaccttccaattgaaccatcggacgtaaatctggtggaataactggaatagcatccataaccatccattcagggttattccctgatttacggaaggcatctaagatgtccaaacgacggatagcacgcgttctcttttgaccttgtgctgacttcaagtcttcctttaattcagcaacttcgccttcaagatcaacgtcacgtaacaattctttgatggcttcagcacccatcttagcgttaaaacgattaccgtattcatctaatttttcacgatattcacgttcggtcatcagttgtttcttttctaaggctgtatcgcctggatcaatcacaacgtatgatgcgaagtaaataatttcttccaatgcacgagggctcatgtctaagacaagacccatccggctaggaatccctttaaagtaccagatatgtgttactggtgctgcaagttcgatatgtcccatgcgttcgcgacgcacttttgaacgtgtaacttcaacgccacaacgatcacagacaattcctttataacgaattcgtttgtacttaccacaagcacattcccaatctttcgtaggtccgaagattcgttcatcaaaaaggccatcacgttcaggttttaaagtacggtagttgattgtttctggctttttaacttcaccatacgaccaactacggattttatctgaagatgctaaaccaatttgcatactttcaaacttattgacatctatcaaagggccgacctcctcataatttatagcacgctttattcagcagatggatctactgcatcagcatttgctgcttgtgctttttcagcttcttcttgtgcctttttggcttcttgttctttagcgtatttagataatgcatcgatgttttcgatatcatcatcatcgtcgtccatatcgcgtaattcaatttcttgattatcgatatccaagaccttcatatccaagccaagtgattgtaattctttaaccaatactcggaatgattccggaacacctggttttggaattggttcacccttaacgattgcttcgtatgtcttcacacgaccaacaacgtcatcagacttgtaagttaagatttcttgtaaggtataagcggcaccgtaagcttcaagagcccaaacttccatttcaccgaaacgttggccaccaaattgagctttaccacccaatggttgttgcgtaacaagtgagtaaggtccgattgaacgtgcatggagtttatcgtcaaccatgtgggctagtttcatgtagtacatgacaccaactgacacacgtgtatcgaatggttcaccggtccgaccatcataaagaatgctcttaccatcagaaggcatgtttgcttcacgaacagcgtcccataaatctttatcttgcgcaccatcaaagactggtgttgcaacatggatgcctaagtttctagcagccatcccaagatgtaattcaagaacttgtccgatattcatacgagaaggcacacccatgggactcaataagatatcaactggggtaccatctggcatgtatggcatatcttcttcaggaacaacgattgaaacagtccctttgttaccatgacgaccagccatcttatcgccgacttggatcttacgtttttgtgtaatgtaaacacgaaccatcatgttaacacctggtgacaattcatcgccagcttcacgcgtaaagatcttaacgtcctggataatcccgccgccaccatgaggtactttcaatgatgtatcgcgaacttcgcgagccttttcaccgaaaatagcgtgcaataagcgttcttcggctgataattctgtcacacccttaggcgttaccttaccaactaaaatgtcgccatctttgacttcagcaccaacacggacaatcccgaattcgtcaagatccttcaatgaatcttcaccaacgttaggaatttcgcgtgtgatttcttcaggtccaagttttgtatcacgagcttctgattcgtattcttcaatatggattgaagtatataaatcttctttcactaaacgttctgaaagaacgatcgcatcttcgtagttatacatattccaagtcatgaaagcaatcaatgggttttgacctaaggctaattcacctttttccatagctggtccatcagcgataatttcatcaacatcaacgtgatcgccttttgcaacgattggacgttggttgtagttcttaccagcatttgaacgacggaatttcattaattcgtacgtatctaatgagctgtcttcacgacgaacgcgaatcactttcgcatcaacgtattcaacagttccgggatgttgtgctaataaagcaatccctgaatcgtgggctgctttatattccatccctgtcccaacaagtggtgcatgtgggtcaactaatggcacagcttgacgttgcatgttagcacccatcaaggcacggtttgaatcatcattttccaagaaaggaatgcaggccgtagcgacagcaactacttgcttaggcgaaacgtccatgtaatctaacttgtcgattgaagtttcaatattgtcatctttgtaacgtgctaaaacagtatcatcaacgaatgaaccatcatcgtttaatggtgagttggcttgcgcaatgacatagttatcttcttcgtcggctgttaaatagtcgatcttatcagtaacatcatgcgtatcccaactaacacggcgatatggtgtttcgatgaagccgtaacggttaacaacagcgtaactagccaaactgttaatcaaaccgatattagggccttcaggggtttcgattgggcacatacgaccataatgggtatagtgaacatctcgaacttcataaccggcacggtcacgagtcaaaccaccaggtcctaaggcagatagacgacgtttatgcgtcaattcgccaaggggattggtttgatccatgaattgtgacaattgtgatgaaccaaagaattccttaattgaggcaacaactgggcgaatattgatcaattgttgtggtgtcacggtgcttgtgtcttggattgacatccgttcacgaaccacacgttccatccgtgataaaccaattcggaattggttttgtaacaattcaccaactgaacgaatccgacgattccctaaatgatcaatatcatccgttgaaccgagaccttcttgtaagttaaagaagtagttcattgaagcgatgatatcagcaggaataacatgcttaatcttggcatcgatatgaccgttaccgattaagttgatttctttatcaggtgttttttgtgagtacactttgatcacttggagtgtcattggttctggtaagacaccttcatcagatggttggtaagtaaccgtcttgaagtcttctttgtctaagtatggtgccaaagcatccatcacttgacgatcaacaactgtatctttagcagcaatcacttcaccagtatcgggatcagcaagtgtttcagctaatgtttgacccaataaacgcgtctttaagcttaatttcttgttgatcttgtaacgaccaacagcagctaaatcataacgtttagcatcgaagaaacgtgcataaagtaatgaacgtgagctatcagctgtcttcggttcgcctgggcgaagtctttcgtagacatccttcaaagcttcttctgttcttgagtcgtcagtattcttatggatatctttttctaacgtcaacattaatgaatcgttgtcgcctaagatatcgataatttcttgatcagaaccgtaacctaaagcacgaactaaaacagacattggaatcttacgtgtccgatcgatccgaacatatgcaatatccttagcatctgtttcaaattctaaccatgcaccccggttaggaatgacagttgtaccataagttgtgcggctgtttttatcaacagcgctgttgaaataaacgcctggtgaacgaactaattgagaaacaattacccgttcagcaccgttgatgatgaaagtcccttggtcagtcatcaatgggaagtccccaaagaaaacgtcttgagatttaatttcaccagtttcatggtttgttaatttcaaagtaacgtgtaatggtgctgagtagttggcatcatgttgtctagcttcttcaaccgtgtatttaggttcaagaagttggtaatcaacgaattctaatgataagttaccagcaaaatcgtcaattggcataatgtcatcaaacatttcacgaagcccttcgtctaaaaaccattgataggaattagattggatctcgatcaagtttggtagttctagcacttctttaatccgtgcgtagcttctacgagtacgatgtttaccgtaattcactaagtgtcctgccaaattgttcacccctctataagttttccgcagcctcattgttacaaaaatatgacaaatattaagaaaatattacatcgccattttttgataattttgagcagaaaaaaaacaaaaacagttattttaagctgaataaatcagactaactatttttgtttttcatgaataccgtgctggacaatagatcagcacaataaatttttctacggattttcgcagttactgtataatatacttcttttactactaaaagtcaataatctgcctcggtactacttatcatagataaattgattattataaaatttagatttggcgctcaaggccttatcaacctttttcaatcccttttcttctattaatgtctttttcgttgaaaatagattagttcctaagcctaaacgttctcccttaatatcaacccccattgcggcgagcgtcgttgggaacatgtccattgtgctaaactggcgattcttggtttgaacctgacttgcttttggtgcatttaaaatcaaattaaatgcatgccgtttattggccggaatcttcttataatactccacatccatgcctaaatggtctccgttgacaatgatggtcgtattctgataaaacgactgcgtttgtgcccacttaataaattcaacaatttgatgatcagaaaaggcgataacgtttgaatactggtcaccatacttttctggcatattcggttctggatacccaccaatgtggtgcgtattctccgttagcatcgttaagttaaatggctgatctgatttgctaagctccaacgcactttccttagcgtattcgaataactttgaatcttcatagccccaccaaacataatagtcttcaggtaaccgaccatctttacgcgcagttaacaaatcatcaatttgaacattaccgtgctgcgtaaaatatgatcgtcgaccaccaaaagtcgcatccgatccaagcaagattttttgctgatagccgtgcttgtccaaaatattatttaatgacgtgacgcctggtaggaaatgattctttttatctgtcgcataggaattcccatccaccggcactttcaacggtaatcctgatgtttgggcgaccattcccgcaactgtccagcctgttcctggtaattgttgggcaccaccaaatgatcggttagaatttgagaagtgaacaccctcttgctcagctaacgccgtcaattctggtagtaaattggttttcatctgcccacccatttctcttgatgttgctgtagattcgagtgactcagcataaatataaattagatttcgtttttgttttgggaacgttaatttggttttattcggtgctacataattttcttcaataaatggtgaattcgccgttagatattcgtaaaaaccaacagcatcaattttaatcgcagcaaccgtcgtcaaaccacaaaacaataacgcactgaccaatacaaatcgttttgccttgagttctaagtggtgtgttattttatgagtgaccaacagttgcaagtgtctgatatagttgcagaacaaaaaaacgctgattaaacaagtaatggcacctagcaccggaccgccgataaatgaattaataaaaccatcgtcaacacctgtcatcggttggcgtaagttataaactatctgctcgggcgttaacaagccaaaatttgcctttgtccaaaaactagctgacaacaagaaatacccaactgatattaataaggcaccactaaaaatccaccagctaaaccaatgtcttgtgcgtgtgactggtaccagttcaaatattaaccatttttggcgccaccttcttgtcaccaacacgacgccttgaataatggtaatcaacataataaacttgagtaaaaataacttttggaacaaaccatcactaaaatgaataacatgaccagtcaacccaaaagtcactaaaatcgttaatcctaatacaagcaccaaattgatcaacataccaactaattgaataaattggcgatcattgcgttggacaatagcacataaaaaaggtaaacagacaaacaagtagatcatcgcaataaataacattatgtatttgctccatttctaactatctcatttaatcatagcattttatggctgtatcgcctacccacccttttaacaaaagtctctaatgacaatcttcaagcccctcacggaatcatttacaaactcgcgacttatcatttacgttttttacacgaattagcggtcaatctttacacgacgtctctatactgaacttgtacccttaaatcagtcctcaggaggaatcattatgaaacgcattagtatggcattactcacagttggtgcggccgctcttttattagctggttgtcaaggccaatcaaaaagtgcaagtcaaagccaggatcaaggcgctaaaattactgcagttggttcgacagcccttcaaccccttgttgagcaagctggcgatcaatatcaaaaggataaccctaaagtcaacgtcaccgttcaaggtggcggttcaggaactggtttaacccaaattagtggtggcaacgtcacaatcggtaactcggacatcttcgctgaagaaaaagatggtatcgatgctaagaaacttgttgatcacaaagttgctgtggttgcaatcgcacccgttgttaataaaaagttaggcatcaaaaatttaaccagtgcacaattgctaggcatctttaaaggcgaaatcacaaactggcaatccgttggtggtcctaacgaaaaaatcaccgttatcaaccgggcccaaggaagtgggacacgtcaaacgtttgaaaaattaggtcttaaaaccgacaaagttgttaccagccaagaacaagattcctctgggactgttcaaaaaatcgtcgaacaaacgccaggcgctatcagttacctcgccttcccatacatcaaaggtaacttgcaagccgttaagttaaacgacgttgagcctaccgaaaagaacgtttcaaccaatgcatggccaatctggtcttacgaacatatgtatactaagggcgcacctaactatcaaacagcccgtttcatccacttcatccaatcaaaagacgttcaaaagacaatcgtccctaaactgggctacatcccaatgacgcaaatgaaagttgagcgccacgttgatggcaccatccaagatcaatagtttccagaagtcgcgctaaactgcgcgactttttaattggtatatactaataaaaagcttttaaacaaagtaatttgcatttatatttatgattggtataatcgaactattagtttatcaaaggagtttggtgaatgattaacaataaaatgaaaacgttatccgaaaaataccccactaaaatggcaattacttccgaaatcatcaacttaaaggccatcttgaacctccccaaacccactgaagccttcatgagtgatttacatggcgaatatgatgccttccagcatctcattcgcactggcgcagggaatctccggcaaaaaattgcagaggtcttttccggtgaaatgactgaagacacaatgcaggcgttcgcttttttagtttactacccaaccgagcggcttgcactcaaacacgcacaactatctgctagcgaactcgatcagtggtacctcaccacttttaaacggttaatcgacctcttaaaatttgtctccacaaaatacacacgctcaaaagtccgtaaagcaatggcgcccgatttcgtctacattaccgaagaattaatgtacggcgatgtagctaacagcgataagaaacgctacttccaagaaatcacgacgtccatcatttcgatgggccaagccgatgccttaattatcgccaccagtcatacgattcaacgactagtggttgatcattggcatatcatcggtgacatttacgatcgtgggccgcgtcccgatctgattgtcgaacaactcaccaagctccccgcggttgatattcagtggggcaatcatgatattctctggttcggcgccgctagcggttctcaactatgtatgctcaaccttttacgcatttgcgcacgctacaataatttagccatcatcgagaaagcttacggaattgaccttagcgaactggttcagtttgcccaacgaacttatcagcccaatcccgccttcgaaccaaaggttgctgccaatcaacccgcaatctcaacagctgaaaagaaaagcatcaaccaagtgcaccaagccatcgccatcatgcagtttaagttggaacaaaccgtgattaaacgcaatcctgatttcaaaatggaccaccgcttaaccctcagccatgttgactttgaacagcagacaattcatctaaatggtcatgactacccacttgataacacctgctttcaaacagtcgaccccacccacccagaaatattaacttccggtgaagcagccattgttacatcattgctaaacgcgtttacccactgccaaaaactacgcaagcatctgcgttttttaatcgacaacggtagcatgtaccaactctacaaccagaatctcctttttcacggctgtattccagttgatgaagccggcaacttcctcacgttaaccctcgctaaccgacaatacgctggtaaatcattactcgacttcttcgatcaccaaattcgaatgagcttcgaccacccgctcaatcaagataatttatccaccgatttactctggtacctgtggacaggaccgctctccccactatttggcaagaacgcgatgacgaccttcgaacgctacttcagcgccgaccccgttttacacgaagaaaagaagaacgcatattaccaactccgccatcaggaagacttcattgagaaactcttgttggagtttggcttaacgccagaaacggggcacattctcaatggtcacacacctgtcaaaaaaggccacaatccaatcatggctaatcgcaaaatgatcgtgattgatggcggcttttcaaaagcttatcaccacacaactggcattggtggctttacgctcctgtacaattcgtatggaatgcagttagtcacccatcagccgttcaccacacgagccaatgcaattgccaagatgcaagacattatttccacgcgtcgagtgattgatcaagttagtcaacgtcaacgtgtcagtcaaacgaatatcggcgctgcgattaaaactgaaattgaacagctcacgacccttttagggcaaaaaaataaggtgtcagaccaattggtctgacaccttatttacgtttaaacagttactttatcagtcttactggtaatggtaattttacctttagttgcgccaattgtcaccggtacacccatcgtaatctcgccagcaagcaacgcttcactcaactgatcttctacttgggtttgtagcgcccgtcgaattggtcgtgccccatattcaggatcgaacccagctttggcaacaacatccatcgctgcagctgtcatcttgatttgaatcccttgttccgctaaacggcccaagacattcttcgccataatcttcacgatttcgcgcaattcaggttgtgttaaggaatggaagacaaccgtttcgtcaattcggtttaagaattctggacggaaagctttcttcaattcttccataatgcgcccttgcattgctttataatcagcagttacatctttaaccccgaacccaacggatttatcatcacgtaaggctgtcgcacctaagtttgatgtcataatcatgatcgtattacggaaatcaaccttacgtccttttgaatcggttaaatagccgtcatccaagacttgcaacaagatattgaagatatcagggtgggccttttcaacttcatcaaataaaatgacggaatatggtttattgcggagcttttctgttaattggccgccttcttcgtagccgacatagccaggggccgccccaactaaacggctcgtgctgtaacgttccatatattcagacatatcaacccgaatcaagttgtcttcagaaccaaacatggcttccgccaatgctttggctaactctgttttaccaaccccggttgggcctaaaaacataaatgaaccaattggtcgttttggatctttcaaaccactgcgcgcacgacgaatcgcacgtgaaacggcagaaatggcttcttcttggccaacaacccgtttatgcaagactttttcaagttgcatgagacgttcgctttctttgcgttgcaactgagtaacaggcacaccggtccattgcgcaaccacttgagcgatgtcttcagcagtcacttgaatgtcactgcgaacaccgttttcttgttcggcagcttgtaacttggcaatcttggccttagtggttacttcttgctcatgaatcgtcgccgctttttcaaaatcttgcgcgcgaacagcggcttctttatcgtcatttaaagtttgtagtttttgttctaatttatccaacggtgtcttctggttaacagcatccaatcgcactttagccgtcgcttcatccattaaatcgattgccttatccggtaagaatcggttcgtgatgtagcgatttgataagacaaccgcttcatgtaaagcttcatctgaaattgcaatcccatgatgagcttcataacgtggacgtaatccctttaagatttgttccgcatcttctggcgttggttcattgaccgtgacggtcgcgaatcgccgctctaaagctgcatctttttcaatgtacttttgatattcatctaaagtcgtcgcaccaattaattgtaattcaccacgcgctaatgctggtttcaagagattagaagcatcaattgccccttcagcgccacctgcaccaatgagggtgtgtaattcatcaataaagagaatcacttgcccatctgcatagatttcatcgataatcttcttcaaacgatcttcgaattcaccacgatactttgtcccagcaaccaatgaccccatgtcgagcatcatgagccgcttttgctgcatgtcacttggcacatcgccattgacgatgcgttgcgcaaaaccttcagcaatcgctgtcttaccgacaccaggttcaccaactaagacgggattattcttcgaacgccgggctaaaatctgcacaagtcgccgaacttcttcatcacgacccacgaccggatcaatttgattgtcacgagcaagttgtgttaaatcgcgcgctaattggttcaacgttggtgtcccagcttgatcggcattattcttagctgctttagcccgttttttagcggttgctgtatccacacccatcttttgaagtagtagttggcgtgttttagctaaactaagtcctaagttcaataagatccgcgcagcgataatatcatcatcacgtaaaagtgctaataataggtgtgctgtgccaattttaaccgaattagcttgttgcgcttcaacccgagcaatatcgagtacttgtttggctttgggcgaatatggtaaataaccgctaatgccagaagcgattacagcatcgccatatccggttaagcgttcaatttcttcaaggacatcggtcgaattgacacctaattcgcgtaaggtagtcccagcaattccctcattttctaatacgattgctaataggagatgttccgttcctagtgcatggtgattaaatttctttgcttgttcttgtgccatcattaagacgttttttgcacttggtgtaaatagattattcatggataatcccccactctttacttaatttcatatcgtagtcgttctaacactgcaactagaatctgtgctcgaagctgctcttctaattgtttattattaaccgctaatgtctgtggactcgttgccgcgagtatcaaattgccttccttttgcgaaagaatttgttcatcatatagtttctggataatggctaaggtgtccgcctgggaaatctgcgtatcaacattttcaattaacgcttctaaaaagtcccgatcatcgagaaattgaaccttgacgatccgaatataaccaccgccgccacgcttactattcacgacataaccgcgctgctcagtgaaccgcgtattaatcacatagttaatttgggacggcacacaattaaaaagcttagcaatttcggagcgtctaatttcgatttgttcattgtcagccagtatcttttttagataggcttcaataatatccgagatgttctgactttgcaaacatatcagccccttcatttagtcttctgcgtttttcagtgtcaaaagtttaactttgactaacgttgactattattataacgattatcagtacaaaatgaaagtttactgacttttagtagctaatcaattggacgcacaaaaaaagacttgtcatcaacaagtctttgagagtcgggaaaacaagatttgaacttgcgacccctacgtcccgaacgtagtgctctaccaagctgagctacttcccggaaactattttattacgggtacaaaaaaagcggaagacgggattcgaacccgcgacccccaccatggcaaggtgatgttctaccactgaactacttccgcattttttattaatatttttgtatccagtttaattaacttcttttggtccgctgttagcagcagtttgaccttgggtataggccaataagtgttcgcgcagatcattttccatgtggttgagttctttttcagccacttggcgtttttcgcggccttcttgttgaatcttgagggtttcttgtaaggtttcaacaagatcattttgtgttttctgtaaggtttcgatatcaacgacgccgcgttcattttctttggcggtttcgattgaagacatcttcaacatcgcactatttttcttcaagaggtcattggtcgtttcagacacttgtcgttgtgcagtgaccgcatctttttgacggagcagggtgagggcgatggcaacttggtttttccagagtggaatcgccgtgttaatggaagcctgaatcttttcagctaatgcttggttggtattttgaatcaagcgaatctgtggtgcttgttgcaacgtgatttgccgtgctaattctaaatcataagttcgtttttccaagcggttcttgaattgattgagatcattaacttcttgcacgaccatttgattatcgtcatttttggcgcgttccatggcttctggaatcgtcgttgtttctaattcttgaatcttcaactgaccagcagcaatataaatattgagtgcatcgaagtaggctttattcttcgcatacaacgtttcaagcgtctcattgtcgcgcattaatgcatttttttctttgtccaatttaacggcaatcccatcaatttgggcgccaattttttgatatttcgcagtgatttcatagaccgacttcttaatcttgccaaacatccgcttgaaaacgttgctgtcttcggcgcgtaattcgtcaggattggcttcgtttaaacggtacatcaatgacgttaatgcgtcaccaatttcgcctgtttcttggctttggacttggttgagcattgtttgggagaaagcgccgagtttcttttgggcttgagcgccgtaattcaagacggcttgttggtcgttgacgtccagttgttgtgccaattgttcggcctgtgcttgttgttcaggggagagcttattgataattgaggcctctgcctggggggctgcttcctcagtgacaactggcgcactttggtcgaaaggatcttttaataaatcattcattaaatcgtttgttggattgggcgtttcagacattagtcttcctccttgtgatctggggtgatttgttgttgagcgacggagacttctgtgtctaagtcatcgacgtcttcggccacgaaatccgcgtagtcttgttgaatctgttgactaagcgcatcaattgccgcagccgatttatctaaaacgagataggtatcggctgtcttgacttcatgatggttaatttcgatgtatttgctagtcagttcattgattgatggtaagtgccggtataaaaagtcgccagcattgtgaagccgctttggatctttcacaatcgcacgaaaaagcgattggctgaccttggttgtatcgtgatttaaatcgattgcccgtaatttaggaagagcttgcatgttggttgcaagtaccttaatttgcgcttcggcttgttgcatcgtttgtctgaaaaagtcaatttcgtcatcactcatgccagcatcttggtagtgtttcagcatttgtggtgaaatatgctgatcttttttatattctggttgtcgtttaagccgtttgaggctgattgtaacgtagatcagccctaataataaaccaaggctgaaccagatgaaattatcccaatcaccataaatatcaaagcatgttgccaaaattgggattgagacaagtgtaatgagcatgcctgtgcaccaaatcgttatttttttaaacataattgtcagctcctgatttaattgatgccttcattctaacaggaattaaggtaaaagagtatccgcctaaggatggatttttaattcggccgtgaacctgaatttagcattgacgatggcggacgattttaaatgcgcgtataatagcgattaaacggtaaaggtggcattagcagatggattatacagaaaaggtcctctcggaagaaacattattcaaaggccagatcattgatcttgccgttcaacaagtggcactgccaaatggacaaaccgcaagtcgcgagattgtctatcatcatggggcggttggcattattccgattacggcggataacagcatccttttagtgcgacaatggcgcgcccccatgcaacgtgaaacgttagaaattcctgctggaaagattgatccaggtgaaaagaacttagatcaggtcgcactacgtgaattgaatgaagaaacgggtttgacgacgcaaaagctcgtgcacgtgacggatttcttttcatcacccggtttttcaaatgaattaatgactttatactacactgatacactaacgccggtcacgcataagcgctcgctagatgacgatgagttcttgaacgtcgaaaagttgacgttagaagaagcacaagcagccgttgcagatggtttaatctgtgatgccaaaacgattatggcgttgtattactggcaattacaagcaaaataggagcggtagaaatgacgaatgaacctaagacgcgcgaagaatatcgacaacaaaaagaggctgaagaagccgcctttaaacagcgcgatcaagagcgcctcaggacagaacgtgaatatgcacgtgaacaacaaaaagaagcccttaaagcggtgactgaaggcgaaccagaaacagcaacgcgtcggactaagaaagtcgatccaccagcggttaaacgaatgaagaaacggttgaattgggcgattgggattacctttggcttaattattatcgtttacttgattctttttttcctatagaatggtaaagttaatgtttttttagaatggagagaattagtatgaaaattagtgtcatttgcgccatggaagaagaaattcggacgcttttaacaaaattagaagatgtgcaacaacacacggttgctggcaataccttttataaaggtcaattgtacggtcatgaagtgacgttggttgaatcaggaattggtaaagtgcaagctgggatgacgacggcgattttattagccgaagaaaaaccagatgttgtgattaataccggttcagctggtgggattggtgaaggccttcatatcggcgacgtcgtgatttcaagcgaagtcgcttatcacgatgcagaagcaactgcctttggttacttaccaggtcaattaccacaacaaccccaacgatttgaaagtgatgctaagatcgttcaacaaatcgaagcggcggctaaagcggttgacatacaaccacgtgttggtttaattgtcaccggtgatcaatttgttgcgagccaagataaaatcaaggcaatcaaagaaatttaccccgaagcgctctcttgtgaaatggaaggtgctgcaattggacaagttgcaacgcaattcaagattccattcgttgtcattcgcgcgatgagcgacgtcggcgacgaagaagccggcgtaacgtttgacgaattcatcgtagaagcaggccaaaaatcagcagcgatgttgcttaacttcttgaagaatattaaataaaagaagtgcgtcatcaacggttagcttctgagcatttgcataacttaacgaattagcgacatagtcgatgatttgataagtgtagcaaagcgcaggaaactgttgatgaaagcacgttaagaaaataagtgtgttcaaactggttatgttctgaggattagcaaaattagacgaataagcggcgaagccgattgtttggctaattagactaaacgtaggaacatggtttgaaaagcacgttaaaggagtccacccatggaaaaattctgtcaaagttgtggcatgccactgactgcacaaaaccaaggtagtgaacaagatggcaccaagtcaaatcagtattgccaactgtgttacgttgatggtcagtggacagaaccaacaatcacttttgaacagatgcttgaaaaagggattgctgggattcgtgccgaccaaacaaccggtaagatgaaacaatggttcctaattaaaagctatccgatgatgcttaaaaagatgcgtcggtgggcataaagtatcaaaagaaacttatcctaatgggtaagtttctttttttggttaaatggttaaattctgctaaactaacaacaacgttacgaatggaagaggggatgtcaatgacaccagaagtgagccagtattggcaacattttatagaacaacagcagttaccacctgatttacaaccagcggagatttattcatttgggaatacagaacaaatggccaatgaattggcacgattggtaataatcggtcaaaaaacggccaccacttctgcgattgagttgtatgaacccgatgagcatgtcccacaagtgggggattataatgttattttagatggacgagaccggccggttgcaattacgaaaacgataatgtgcacgattgttaagtataatcaagtcgacgctgaacatgcctttttagagggcgagggtgatcgaacccttgcttattggcgttcagttcacgagcctttttttaaagctgaatatgcagaggcagggcaggtgtttacgccgacaattgcctgtttatgtgagcgttttgaagtggtaacggagaggcgtgaattaagatgattcctacacgattgtcagaaggtgatgagattcgggtcatcgcgcctagtaatagtttgcaaagtgttggcggatatgtggctaatcaaccggcgaatgatcgattgagtgcacttggttatcaggtgacgtttgggcagcatgtcttggtaatggaccaattcaattctagtccaattgaagcgcggattgccgatttgcacgctgctttcatagatgacaatgtcaaagcgattttagcggtgactggtggttataacagcaatgagctacttccctatatcgattttgatttgattgcaagccatcctaaaataatctgcggttattccgattttagcgcgctggcaaatgcgatgacagctaagacaggcttgataacgtattatggaccatcctatatttcgtttaaattggtagatcagttgggcgattatcaagcgcataattggcaaaaagtcatgacgcaggaagctggaccaattcggttggcggcttccaaagagtggtcgagtgatgcgtggtacttaccgaatgcagcgcgggattaccagcctaatcgttggtagagttatacgtctggctgtgtaactgggacgttagtgggcggtaatttaaatacactttatacattacaagggacagcctatcaaccggattataatgatcaagtgttattgattgagtgctcagatgggtcagatccgtttgatttttcacgcaatttggcggcattattacagagtatggaacatccgaaggccttgattatcggtcgtattccaaccgatgtcgcgctgagtgagacagatttaatcgctattttgaataagtttccgattttgaagacaatccccgttttgtacaacgttaatgttggtcatacccagccgattttaacgttaccgattggacagtcaatcacggtcaatgcgacagagggatggttacaaatcgaaggcgattaatataaaatgcaaaagcggcggatgacacaaaaattatttttgtgccatccgccgcttttgatatccgcatatttgtgctatcagttatatgcctgcgattaacagtaactacaacacactctctttagagtaatgctaaagttcgttgcagttccggttcttgttcaagttttgcgagtggtaagtcatgggtcacttgatggtcttcattaaagacgaccacccgtttagcgacttgtttgacttgagccaggttgtggcttgcaattaaaatccctttgccggcttgattgagttgttggagcaagtggataatcagcgtttggtaggcggctgataggccgttgaatggttcatcgagcacaattatttcaggattcatcgttagcacactgcccaaagcgacgagttttttttcgccaccggaaagttgataagggacgcgatcagctaagtgttcgatttgtaacaacgcgaggcaatcgtcaacgcgggtttgcacttcatctggggctaagcccatctgttctggaccaaaagcgagttcggcgcgcaccgtttcgttaaataattgaacgtcactattttggaacacaaagccgattgcgcggtggagggcagtcgcctgtgcaggctttttgaggaagcgggcatcgacaagttggtctttaaaataatattgtcctgcgctgggctgaatcaaaccgttaattaatttaaacagcgtcgattttccggaaccattaggccccataaacgcgacggcctcgcctgcatcgatggtaagagaaatatcgttaaggctgtcggtttgcgtataggcgtagtgaatgtgttgcaaattcagcatctgattacctccgaatgaaacagaataggcaaaatagccctagatcccagctgattaagcgccagtcgtagcgattcactgttagcggcgtccgtcgggtgacttgtccggtgtagccccggagaatcatcgcatcgtataaagcggtaatgtagttgcgggaacttaagtagaggcggccaatcagtgaaccgactaaattttgtcgttggtggcttttaccagttgagcgtagccgaattgcccagagggattcttgtaaaaattgggcgagcaagtggctgtatttcagactaatttcgagtgtcaaaatgagcagactggggagtcttaattgacgtaaagcaacaataaaagcgggccaagtgatcgtctcgagaaagaaagcaatatttaataacatgatttcagtccgtacgataaataaaagcgttgtggcgacttggccgagccaaaaattcggtagaattaataaaatcgcaatgatactgatatcaccgacgcgtttaaaaagcggccataaatgctggcttggtaagcggcaaattcgaattaacgtcaataaaccaatcaaccaaattaaaagtagactatgggttaacacgagaatgatgagtgtcaccaataaactaatcagttgaataccaggcgtttgatgggcggttaaaggttgaggctttgtttgattaaagcgccgcagcaaacgatcactaaagcacaaattttgaattaaaaaacggtcgaattgcgcgaccgttttgggcgtagcttccgttgtttgaagccaagttggtaatttaggattgggttgaataatgattcatcaccagttttccgataagataaaaaacaatgacggctgttaccgctgataagatgtagccaagtgataatggaacgccagcaactgtgtagtcactaaagagggcattaaagtttaagccatgggccataccacttggtagactgtgacctaggtgatcatgtttgagttgtgtaacgagttcgcttgcgctccattcgccccaagcagtaccactagctaataggccaatcggcgataagataatcaataggccgatgaaactgtaaagcgcgcgatgtaaacgacggctggtttgtggatcaactgtttgacgtggtgcaacgaacagttcgttaggtgcaacccggcaaatgaattgataaacggcgagggtaaagccggcttcaacccaaccagcgactaataaatgagcgaacaacatggctggaattgcaatgtgtaacggataaggggcatacatgggttggccagctgcgttatgcgcaacgagcggttgcagaccaagttcaataccggccattaatgcggcggcattaatcccgagatatgcgccaactacgactcccactttgggctggtgtgctttttggaatagtcgatagagaccatagccgacaaatggcatgataatggccatgttgaaaatattggccccgagtgcaagaatcccaccatcaccaaataaaaaggcctgcatgatgagtgcaatcgttaccgctagactagcggcgtacggcccaatgagaatcgctaatagggttgcaccaacagcatgggcggttgtaccgccaggaattggcacgttaaacatcatcatcagaaacgatagtgaagcggaaatccctaacatggggaccgtttcttttttttcggtgacttggtatttaactttcttgagtgccaagccaatgactggaatagcggccgctgcaagcacggcacacgtttggggacttaaataattatctggaatatgcatacataaaaacctccactgatttgttctcgactattaaggctacgcgtctcatagccgttttcaatcacgaatcatgtttacatatgttaacaaatcgctaattggcgatattatcaagcaagtaactgacatctttgattaagaatttatgctcggtggtttcaatcacgccgtcttttttgagttggttgagcatgcgattgacactactgcgcgagctaattccgcagaagccggcaatgtcttcgtttgtaacgacgaagtcaatcaggatgccatcgcggcgtttcttaccaaagagatcaattaagctgtataagaaggcacacagcccgccgtttttaccgttcattaccattttttgcaagcgataaatattctcggataattttttgcggtagtaatttttaacgtaattctgtaactcgggggtggcattcacgtagttccagaaggtcacgcggtcaatctgatagaaagttgcttcctctgtttcaacgcgaacgttaaacggttgatccgtatattttgaaatttcatcccgtaaaagtgaaatgacatccggctgggtaatgtaagagagattgaattcacgaccgtcttgtaaaatgatcgagtttttaatcacgccttttttcagaatataagtataccgttcttccaaaccgtggtacgtcaagtatgtgtgcttctttttggtaatcactgggacgtgacgttcctctaaaaagttaattaaaaattcaatgtctgttaaaaccataatgcatctgcctaccctttgtgctgatttattatatctgctaatcattaaataactttaatctaaattatacgtcttgaagactataaggttgttatcatttgttacacctaaaagtaataatgaaatgttgttcataaattataccgcatccttttcagaaaatctgtataactatggacgtagctttaaaaaagcattcaatcagcattgagaaaggaagtcctatagtttggtagccattaaattaccttacgatcaaaaaattatcacggctaatattgcagacgcgaattttgccgggaagcttgtttcacaagctgctacgtatcaaaatccaatgagcgaagccgaaacggttgaaaaatcattggacaatcccattgatagccctaagttagaagagttggctaaagggaaaaagaatatcgtgattatcagttctgatcatacacgaccagttccttcacatatcatcacgccgattttactaagacggattcgttctgtagcaccagatgcacggattcggattttagttgcgactgggttccatcgaccatcaacgcacgaagaattggttaacaaatatggtgaagaaatcgttgcaaatgaagaaatcgtcatgcatgtttcaaccgatgacagctcagttgtgaaaatcggtcaattgccatcaggtggcgattgcattatcaataaagtcgctgttgaagctgacttattgatttctgaaggcttcattgaatcccatttcttcgctggtttctcaggcgggcggaagtctgttttaccgggtgtggcttcatacaaaacaattatggccaaccactcaggtgaattcatcaattcccactattcaagaaccgggaatttaatgcataacccagtccacaaagatatggtttatgccgctaaacaagctgggcttgaattcatcttgaacgttgttttagatgaagacaagcacatcatcggttcattcgccggtaatttagaaacagcgcacaaaaaaggctgtgacttcgttgaaagtttatcagaagtcgacaagatcgattgtgatatcgccatttcaacaaatggtggctatccacttgatcaaaatatttaccaagccgttaaagggatgactgctgctgaagcgacgaacaaacaaggtggcgtgattatcatggtcgctggtgcacgtgacgggcatggtggtgatgggttctatcacaatattgctgacgttaaggatcctaaagaattcttagaccaagcaatcaatacaccacggcttgaaacggtccctgatcaatggacatcacaaatcttggctcggattctggtccaacatcatgtgattttcgtgtcagatttggttgatccacaattaattacagacatgcatatggaattggcaaccagtttagatgcagcgttagaacgggcctacgagattgaaggggcagatgccaaagtgacagtgatccctgatggtttaggggttattgtgaaataacaatagaaagaatgagtagtttggacacaacaaatgagctacaacagcttttagaagctgttgcaaaccaaaaagtcagtgtgacagaagcaacaaagcaactggcacatgcgcagaccattgatgatttaggctttgccaaggttgatttaagtcggcaaaagcgcaatggctatccggaagtgatttatggcgccggtaaaacggcggaccaaatcattggcatcattggttcgttaaaacgacatgccgaaaatattttatgtacgcgagtttccccagaaaagtacgctgcgattcaagaagcggaaccgacagcaatgtactatgaaatggcgcaatgtgtagtactgatggttgacccactaccaaccacggatcactatatcgccgttgtcacagcggggacttccgacatggcagtggccgaagaagcggcggtcactgcagaagtatacggtaatcaagttaaacgaatctatgatgttggtgtggcgggcattcatcgcttgtttgaacatttggatgaaattcgccaagcccaagttgtcatcgtggtcgccggtatggaaggggccttagccagtgtggttggtgggttgatcgaaaaacctttgattgccgtgccaaccagtattggctatggcactaactttggcggactaacagcgctgatgaccatgctcaatagttgtgcgtccgggattaccgtcgtcaatgtcgataacggctttggtgcgggctactcagcaagtatgatcaatcatttaagtgacacggaggatgacaaatgagaactctttatttagacgcattttcaggaattagtggggacatgttcatcggcgctttgctcgatttaggggttgatttcaaacagtttgaaacagaattagctaagttgaatgtccctggctaccacctacatgcagaacggattgctaaaagtagtatttatggcaccgattttgacgtccatttgccagaagccatgcacaaggatgaaggttttattgaaacaacaccggcacagcatcaacatccgcatacacacgcaactggccatgcacacacgcatcaacacgcaaatggacacacgcacagccatggtgatgacgtccgacatttaaaagacattgaagccatcatcgatcacagtgatttaagcgattatgttaaaacgaacgccaaacaagtttttacagaaattgcgcaatcagaagcggtcgttcatgacctaccattaagtgatgttcattttcatgaagttggggcgcttgattcaatcgtcgatattgttggagcgtttgtcgccctcgaattattggcagttaatcaagtctattcatccgaattaacggatgggagtggctttatcaaagtcgcgcatggcatgatgcccgtaccagtccccgctgtgatgcaaatgcgcgtcggtagtgcgattccaattaaacaaaacccagacttgcagaccgaattgatcacgccaactgggatggggattgtcaaaacgattgtcgaccaattctgtccaatcccagacgatcaaacgatcattaaagtcggctatggttttggtaatcgggaaacaccgcaactcaatgcattacgcgtgatgttgtgcgaaaaaaaaaactaagccaacaggttgttaaaaccgataccgatcagattttagtgttggaggccaacattgatgaccagtcagcagaaagtttagcgccggttttggatttattgatggacaatggggcgctcgatgcctttttcagtccaattcaaatgaagaaaaatcggcccgcaattaagctaacggtcatgattcatccagccgatcaacaagccatgacttatctgatcttaaaacacacagcaactgttggtgtgcgttaccagacgatggggcgcaccattatgccacgtcattttatcactgtagccacgcgcttcggcgatattcgggtcaaaatcgtgaactatgacgatctcgaaaaatatagtccagagttcgacgattgtctagctgccgccaaggcgcatgacgtggcacttaatcaagtttatcttgctgtttatcagagtatgcccgagtcgggtctatcctgatgtaacgcgttaaagctatcaaaatttagatattaaatcgttattatttggaggaatttattcatgattcatcagttattagcagaattcatgggcacagcgctcatgatcattttcggggttggggttcacagtgatgaagtcctcaaaggttcaaagtatcgtggctcaggtcatttatttgccattacaacatgggggtttgggattacagtttcattattcatcttcggagatgtttcaattaacccagccatggtgttagcacaatgtatcttaggcaacgtttcatgggcaatgtttatcccttactcagttgctgaagtcttgggcggggttgtcggtgcagttatcgtctatatcatgtacgctgatgaatttaaagcatcagaaggcaatgtcgatcctgttgcggttcgtaacatcttctcaacagcacctggtatccggaatttaccacggaacttcttcgttgaatttttcgcaacatttgttttcatttcatcaattatcgccattacacaaatcaagacacctgggattgcaccaatcgcagttgggttacttgtttgggcaattgggatggggatgggcggtcctaccggattcgcaatgaaccttgcgcgtgatatgggtcctagaattgctcacgcgcttttaccaattaaaaataaagccaactcagattggcaatacgggattatcgtgcccggaattgcaccatttgttggtggtctatgtgccgcactctttatgcggagtttctttggcatctaatttaatcggaggaatcaaccatgcgtgaacaaattaaacaaacgcaaaacatgatggtcgacttattcgaagtcgctgctcatgcctcacaaccggggacaatctcaaccagtttaattgaagcgcaacaagcgcttttaacagcagaacaactttatggtagccttgatgacgcgcaacaaaccgctagtcaatcaactttcaaaaactttgttgatagtgccgcgcatttaaacttgatgatcgtcaagagtttagataacaacgatttggtgtatgccgatcggattcaaaatgaattaacagctttaaaacaattaatctaatgatatagaaagaagtctttaacaatgaatacattatctgaaaaaaaagcaatgttaactgtcagtttacaacaaatggaaaaagtgattgttgccttttctggtgggattgatagcacattagttttaaaaatggctttagaaacactcggcaaagaaaacgtcttagcagtcgttgctaactcagaattattcacagacgaagaatttaacaaagccatcgacttggcacatgatatgggcgcgaatgtcgaaacaacaacattgaactacttatctgacgaacacattgccaacaacacaccagaaacatggtattacagcaagaagatgttctatacacaattgaaccaaattgctgctgaaaaaggctttgaccacgttttagatgggatgatcatggatgataacagcgacttccgtccaggtttacgggcccgtgacgaagctggcgcagaaagtgtccttcaaacagctggtttttataagattgatgtccgtcaattagcaaagacattaaacttaaataactggaataaagtagcgagctgttcagtttcttcacgctttccatataacacagccttaactgaagccaaaattgctcaagtgatgcaatctgaaaaattcttgcgtgatttaggttttgcaacggttcgtgttcgttaccacgaatcaatcgcccgggttgaagtcccagaagcacaaattgctgacttcttaacccacagcgaacaaatcaaccaagcattacaacaagctggttttgaatttgtaacggttgatttagctggtttcaagagtggccggatgaatgaatcattaacagcagatcaaaaagcagctttaatgactgcttaatctgagattaagtgttttaaaggctgggacaaggtatctttgtcccagccttttttggtagcgaaaagtgtttatccgtgctttaaaagcgaactatgttaaactattatagatactttttaaaatgaggcgaaaaattgtgaaacatatttatttagataacgcggcaacgacacccatggccccagaagtcattgcgacgatgaccgaacagatgcaggccgatttcgggaatgcatcgagcacccattattttgggcgccaagcccacacggtgttggataccagccgccatactttggcacagagcattcatgcgaaagataacgagcttatcttaacgagtggggcaaccgaaagtaataacacggcaatccttcagacagccaaactgcgtgctaaagaaggcaagcggattattacaacggcaattgaacatcattccgttttaaaaccgatggcctatttagaaatgcaagggtttgatgtgatttacttacccgtcaacgaacaaggggtgattgatctcgcagatttgaaggcggctttaacgcccgaaacgattctagtatcgattatgatgggcaataacgaagtcggcagtcatatgccaattcacgaaattggtgaacttgtccgcgactcaaacgcctggttccacacagatgctacgcaaacgtatggcttattagatatcgatgtgcaagctgacaatatcgatttactggcagtttcagcccacaagatcaatggacctaagcaaatcggcttcctctatgtcaacgacgcgattcatttaccatcatttgtcctaggtggcgaacaagaaaagaagcgccgcgcagggactgaaaatgtgcccgctgtagctggttttgcgaaagcagttgaattattggccccagcggttaaagcagacctacaagcacggtatgctggattcaaacagcaattactagctgatttaaaagccaacgacattgattttgcgctgaacgcagaaggagctgatcaagtcgggcatgttgtgaacctctggattaaaggtgtttcaacctatgtcttgcagatgaatcttgatttagcaggctttgcaatttcaggtggttcggcatgtactgctggcgatttggaaccctcacacgtgttgatcgcgatgtatggtgaggatagcccgcgcgttgccgaaagcatccggattagttttggtcacgaaacatcgagcgaagacgtcgctgcttttgccgaagcgctcacgaagattgtgaaacgcaatttagcaaagcaagccgctaaggggtaggcagcgtttacgtgcttgtgctaaaatagacttattcagtgtatggaggttaggcagatggctttattaaaaacaacagcaacggttttggggagtacggtgcaatatcgactcaatcccgccgttaaaaaatacacattaagagatgttggctttgtgcccacaaacaatggtaacttccagatggaacggccattagatcctaattcaccatttaacagtgcgattaagttgaagatgacaattggtaaagagttacagacgttgaagatgtctgtcacctctccagatggcttacatccagtcgatattttcaagagtgaaaagaatgctgaaaacgtcgaacaatttaattttattattgctaacttagtggcacgtgaagtgttaattaaagaaggctaaataacgttttaagagcggtttaccaggagtttgataggtaaactgctttttttacgtttaacttatgaaaagtgagtgttttagtttgaaatattaaccaagattgctataatgttaagtactggaattcacgaccttcaaatcgtagaaaactagaatctatttgaaatgatggtgatattgtggttgaccacagtaatacacgagtcgtcgttggtatgagcggcggggtggattcatctgtcacagcattgttgttaaagcaacaaggatacgatgtgattggtgttttcatgaaaaattgggacgatacagatgaaaatggtgtctgtaccgcaacggaagattatgaggatgttgccaaggttgcttctaaaattggcattccttattattccgtcaacttcgaaaaagaatattgggaccgcgtgttcgaatatttcttagacgaatacaaacacggcagaacgcctaatccagacgtcatgtgtaacaaagaagtgaaattcaaggctttcttagattacgcaatggaattagacgctgacttcatcgcaatgggccactatgctcagattgaacgcgatgataacggcatcgcgcacatgttgcgtggcggtgatagcaataaagatcaaacttatttcttgagcgctctttctcaagatcaattacaaaaatcaatgttcccaatcggtcacatgcaaaaagcagaagtgcgtcggttagctgaagaggctggcttagcaactgctaagaagaaggactcaaccgggatttgtttcatcggtgaacggaacttcaagcaattcttaggcgaatacttaccagcacaacccggtaagatgatgacggtcgacggtcttgaaaaaggcacccatgacggtctaatgtactacacgattggtcaacgctccggtcttggaatcggtggcggtggcgaatccaatgatccatggttcgttgttggtaaagatttagacaaaaacattttatatgttggtcaaggctaccataatgaattactctatgctgatcaattagatgcaagtaatatttcttggatcacaccagttgatcatgggacagatttccacgtgacggctaagttccgttaccgtcaacaagacgtcggcgtaaccgtccacatgacatctgacacaactgcaacggttgtctttgatgatccagtgcgtgcgattactcctggtcaagcggttgtcttttatgacggcgcagaatgtttaggtggcggcacgattgacgtggcttataaggctgcgaacgatgatgctgacatgaaagtattacaatatatctaatttaatcgttaaaagtgctgatgaatttatatttatcagcactttttttgtgggtttgttcaataagtggtcaacgaccttttttagaataaaatcacaatataacgtttaaaacataagtggttattcgttttagattgtgaaattaatttaatagctggaggcaattgactttccgaaactaagtagcgtacaatatagttacatgctggttgcgtaatatttcacaaattctcaacgattaaccgtcgttttttggatatttctaggaggtaacatgatgaaagtagcagttattggttgtacacacgcagggacatttgcaacacaagcaacattggcagaacatcctgattgggatgtaacggtttatgaaacacacgataatttatcattcttatcatgcgggattgccctttgggtgggcggccatgtagccgatcctcagaaaatgttctattcaaatccagaaatgttagcgcaagcgggcgctcacatgaagatgcaacacactgttttagaagctgacttagatcaaaaaatattacgcgttaagaacctagtaacggaagaagaaacaaccgaaaaatttgataaaatcatcgtcacaacaggctcatcacctgtgattccaccaattgaaggcattgacaatccgaacgttaagctctgcaaaaactgggcgcatgccaatgaattgaagaagagcgccccagatgtgaagagtgttatcgtgattggttcaggttacatcggtgccgaattggcagaagcctatgcaacaactgataagcaagtgacattaatcgatgcattaccacacgcactcggcaagaatttcgatcctaatatctcagaaatcgtggaacaagattaccgtgaccacggtgtaaccctcgcgcttagcgaaaaagtggtcagtttctcagggacggatcaagtcactgttaaaactgataagaacgaatacacagccgacattgcaattttatgtgttggcttccgcccaaatactggccttttcaaagggcaagttgatatgttaggtaacggtgcgattttgacggatgaatacatgcaaacgtctgttaaggatgtttatgcagccggcgattcagcagctgttcattacaatccaacacaaaaagcagattacattccattggcaaccaacgctgttcgccaaggccttttaatcggccgcaacatcgaaacaccaactgaaaagtacatgggcacgcaagcaacttctgccgttgaattatttggtcgcacctattcagggagtggcctaacagttgaaggcgcgaaagtgcgtgggattgaagtcgctacaacaacgttagaacaagattaccgccctgatttcatgccatcaacgacaccggttttgatgaacttaatgtgggatcctaagacgcgtcaagtattgggtggttcattcacaagtatgtatgatattgctcaagcagcgaacgtcatttcaatggccattcaaacgaagatgacgattgatcaattagcaatggttgacatgttcttccaaccaaactacgatcaaccagtcaactacgtcaacgcaattgcaatgcaagctgtcgcagaaagtaaataaaagagtgtgtaagtaagcgttcatattttgaggattaactggatttggcaaatagggttaaccgcagaaatatgcctactgaaacacgtttagagcaactaatagatgaaaccgctaggataaaaagtatttttatcctagcggtttttttgatggcgttttacaggaaaaatgcttgctttattagtcgattgacttgaatttagggcgtaactctttcataatgaaaagtaagttattttaaggagagaacgcatgacaaccttatattttatccgccacggtaagactgaatggaatttggaaggccgctatcaaggtgcacgtggtgattcaccattattagacagtagttacgttgaaattgaagaattagccacatttttaaagcccattcattttgatcatttatatacgagtccgttaaaacgcacacaggtaacgtctgcggcgctaaaacgagacttagggcaggattttccgattacggttgttgatgcactccacgaatttaatctcggtctaatggaagggatgcgctttacggaagtcgaaaaacaatatccgacaatcgtgaaggcctttcgtgaagcaccagcggagtatgatccaactgaaattaaaggggaaacctttgaacaagtgattgaacggacaacgcaagcaattgacgcgattgtgaaggctgctaaaccgactgatcatattattattgtcagccatggggcagcgatggtggcgatgatgcagtccttactcaagacaccattggctcaggtccgcaaagacggcggtgtgacaaattcatctgtgaccacgatgacaactgacgatcaaggagcatctttcaaactaattaagtggaatgatacacacttcctcagcaagcaattatccgcaacagatacgatataggagatgatcacgtgcaagcaattctagcaaaatgggccgctggcgaccacgaagccgctgttaaagatctcgtacaatatttacaagatcactcagaagacattgaagcttacgttacccttgcgacatttttaacgacgcttaaagattttgaacaagctgaagcacttttgcaaaaagcgttgacgcaatttcataatgaagctgcattgacttacgcattaggaacactctattatcaagcggaagcttatcaacaagcggtgcccttgttcatgcagttggtgcaagactcacaatcaacagatgcgcagtatatgcttgcgcagacatatcatcaactcgaacagaatccacgggcattggcgttcgcgttgaccgttcaagaacaagaaccagaccaactagacgccaatcttttagtgggcgatattttaacgagcttgggtgattttgaccaagcgcagacctaccttaaaaaggcattgaccattgcacctcaaaatggtgaagtattatttaagtatggcttgacgcaactggtcttaggcgctgatagtgagccttatttcgaacaagccaagcactatgcaccggattattttaaaaagaataaacaacagttaattgatattgaaggcttcatgcaggctaaagagcaaaaagaataagggatggcgattgtggatatagcaaaaacagacgaaaccaaaccaacagtcaccggaaccgtccagagtattttctatgagagcccggataatttttttaaaattctactcgttaaagtagcacataagacgattgactggcacgaaacagaaattgtggtgaccgggagttttggcgacattaaagaagatgaacgatataccttctatggcaaagtggtcactcatcctaaatatggcaaacagtttcaagccgataattaccaagtggaccaaccaacgactaaggccggcttagtcgcttatttgtctggcgaaaaattcacaggcattgggcagaaaacggccgaaaaaatcgtggatactcttggaattgacgcgattgataaaatattagaggatccgacggcgttagaaccattggggctaaatgcgaagaaacaagcacaactcgttgaaacgctgacgattaataatgggatggaacagattattattggcttaaacaactatggttttgggagctcgatggcctataacatctatcagacctaccatgaagatacgctgaagattatccaagaaaatccgtaccaactcgtggctgacattgctgggattggctttaaacgtgcagataatttagcggagaccctcgggtttgccgctgattcagccgtgcgggtgcaaggggctttaatgcaagcgttaaatgagttgaccaatcaagctggggatacctatacccaggccaagccgttattggcagctagtattgagttgatggaaaaagcacgcaatgttgctattgatccgaacttggtggctgaacaactgatggcacttgcacatgatgggaaagtcgttggtgatgagaatcggatttatccgaatgggttatttaatgcggagtggcaaattgcgaaccatttaatgcgaattgaaaatgaacgcgatcaacttagctatcctaaacatgatctagatcaagaaattcgccacctcgaaaaacggtttaagatgacatacgatgacgtacaacaagaggcgattaagcttgcgatgactcaccgggcgttcttattaaccggaggacctggtactgggaaaacgacgattattaacggaatcgtgacattatacgctgaattaaacgggctgtcattagatattaatgagtacaaagacacgccgtttccgattttattggccgctccaacaggtcgggccgcaaaacgaatgagtgaaacaacgggtttgcctgctagtacaattcatcgcttactcggaatcactggccgcgaaaataatccagatgtttccggtaacaaagaattggaaggcggcctattgattattgatgaaatgtcgatggtcgatacttacttgtttcgctcattactacgggcggtgcccagtcatatgcaggttgtattggttggggataaggatcaattaccatccgtcggggcagggcaagttttctttgatttattgcagagtaaggttattccagcggttgaattacaacgtatttatcggcaagatgaccagtcaacgattattccgttggcgcatgaaattaatcaaggccaactgccagcggatttgttgaagccgcaaaaagaccgcagtttcattcaatgtaatccgtatcaaattgaatcggtgattgaacaagtcgttactaaggccaaagcgcgtggttttgaaactaaggacattcaagtgctagcgccgatgtacaaaggagcagccggaattgatcagttaaacccgatgattcaaaatatcatgaatccaaagctagatgaccgcaaaaaacaagttagcattggtaacgttcactaccgcattggcgataaagtactccatctggtcaatagtccggaacaaaatgtgtttaatggtgaaatcgggcagattacggggattacctatgctaaaaagagtgcggacaaggttgacgagatcaccattgcttttgatagtgcagaagtgacctataagcggagtgagtggcacaagattacattggcttactgtacgtcgattcataaggcgcaaggttctgaatttgaaatggtgattctaccattggtcaatcaataccaacgaatgctcaagcgaaacttactgtacacagcagtcacgcgggctaaatcattgttgattctgattggtgaaccgagtgctttccaaaaagcagctcaggaactttcggccaatcggcaaacgacgttaaaagaacggattcaaagtgtctttaacggtgaacaactcagcaccgccattaagacggccagtgtggggcagacagaagccaaaataattgttgaccagccggcaccaccaagtgcgccagaaacggctgttgatgaacaactgaacttagtgccagaagacgacgacgcaatacaagaaacgccaatcagttatgtcttaacaccgactgttctaacgcaacagcaagtggatccaatgattgggatgaccggggtgacaccgtacgattttatgccgaaatcaaaatagtgtataatagggtaaacaactaacgaaaaatgaggcgaaacaatggttgaccagcgatctaatttagagattagacccgtgacaattgaacatttagaacaatttaatgacttattacggtatgtttttcaagtcaccgatcaggaagtttctgatagtggctacgaagagggcgaattagaacgcgccaaacgtcccgtattagaaaaatctgacgtaatcggatggtttaatggggacgaactgatttcacaattagccatctatcattgccgcgtgaacattcatggccaggtatttaacatgggtggtttgactggtgtcgggacttacccggaatatgccggtcatggtttgatgcatgacttggttaaagtcggcttgaacaagatgcgtgagaataagcagtggatatcgtatttatatccatacagcattccgttttatcgtaagaaagggtgggagatcatgtctgatcacctaacttatgatattcgtgatagccaattacctaagcaacggccggtaaatgggcacgttgaacgccttgatattgacgatgaagacgtgattaaaacgtatcaacggtttgcactaaaaaatcacggtgcaatgattcgtaacgaactgaactgggatgaatattggcgttgggaaaatgaagaagaacggattgctggtgtttattatgatgaaaatgaacaacccaccggctatgttttatactggattgccaacgaagtcttccatattaaagaaatgatttatcttaatcaagaagcccggattggtctgtggaacttcattggcgcgcattattcaatgattgaacatgtcaagggtaatcaatatcaggatgaaccgatttcattcttattagaagatggtgatattgaccagacgattaagccatattttatggcgcggattgttgatgtgcgtgaattcttgttggcttatccgtttgaaacggacgggcaagcattccacattgaattgaccgatccattagctgaatggaataacggtacgtttggcgtttattgggatgaacaaggaaaagtgcaggtcacaagtcgcccagtcggtgaacgaattcaatgcgacatccagacactaacaacaatgctgatgagctatcgacgcccatcatacttggcaaagattgaaagactacaagccaaccgacaagcactaaaaaatctcgagaatattattccaatggaccaaccatacttctcggattacttctaaagaaatgagtgcattcaagtttggtcaacttttgtgcactagccttgtgttgctaggcataggaacatgatttgaagagcacgttaaaaggcgctgcccccaacttggaggcagcgccttttatttatttatgcttgcttctttagccaaaatgcctggcttttaagactatagtgaatatcaaatgtccggctaccaagttcttcaccgtccatttgcccgaattctaatgtttttgtttgaatcgctaagttggttccttcaaagtgatgcaccgcttgatagcgtgtgtgccgaccaaacagcatcatcacaaaaagatagcaaaagaaaaagggattcaatttttcaatcacaattaaatcaagttgatggttgtcgaccgttgcgctaggcatgatggggacccctccgccaaagtagggatggttagtggtggtcactaaaaagccacgtttaaaataatgattttggtgatcagccgtgacggtgacttcaaacgcatcttggtgcataaaaactttaaccaatgagctgatgtaagctaatgagcctaagtgcaatcgatttaaaagtcgtttatgatttgaatgattggtggtgctgaccacgttggcatcaaaaccaatccccacattgttaacgaagtagccatggtcgttcttcgttgtgtcatgataataacctaaatcgatggcagttggcattgtggccgacaagatttgttcgagtgcggtcaatggatcacgactaatcccgacaccacgggcgaagtcattacccgatccacaaggaatgtaagcaatcggaatatcgccgcgctgagcattctggagaccattgatggcttgattgagcgtgccgtctccaccaataattaataaaatttgatccgtgtacttaaactttgcaaattggaaggccaattgggtcgtgtgacctgcgtagtgggagagttgaaggtcatagtgaatttgtttttgttttaattgagtttcaattttaggccagatactcgctgcctgaccggtaccggcaacttggtttaaaatgatgtaaaaatggggattggagggcatgaacaagccgcctttcagaaaaagtaatctgttgtatattatagcggtttttaccaaatgttgacaataaaaacttgcattaaacaataaaaaaagcgccaggtcatatattgacctggcgcaaaacttattattctgtactttgaatgatcattggtaaaatcattgggcggcgttctgttttttcaaacaagaagtcttgtaagccatcaatgattgcttcgcggacttggttttcagtgaccttgtcgttagcgttaaacgtattgacgatcattcggaaaactcggcgttgggcttcgctaatcaattcacctgattcacgcatgtagacgaaaccacgggagaggatatctggaccagcgagaatgttcttttcaccaagattgatagttgccacaacaacaaccaaaccttcttctgagagcattttacgatcgcggagcacgacattgccaatatcgccaattccgttgccatcaacgtaaacgtcttcggcgctaaagtgaccagcaacccgtgctgagtcagaagtgagtgctaagacgtcaccgttttcaaggatgaagcagttatcaggttccacaccacattgttgagcgagttccgtatggattttttgcatccggtattcaccatggcaaggcatgaagtacttcggtttgattaaccggagcattaatttttgttcttcttgaccaccgtgacctgacgtatgaatgttattcactttaccgtgaataacttcagcaccagcttctgaaagcttattaatcacgtggttaacgctcattgtattcccaggaattggattacttgagaaaacaacggtgtcgccaggttgaattgaaatttgacggtgagtcccattggcgatccggcttagagcagccattggttcaccttgagatcctgtacatagaatcatcactttgtcggcgggcaacgaatttaattcattggcatcaactaaagcttcatcgggaatatttaaataaccgagttcacgaccgttgacaaccgctgcttccatactgcgaccaaagacggcaattttacgaccgttagcaatcgcagcatcagtggcttgtgagacccgtgaaatattagaagcaaacgttgcgaaaataatgcgaccttcaatgcgttccacaatatggcggattgaagtgccgacgaaacgttctgactttgtaaagtttggtacttcggcattggtactatcagacattaaacataaaacgccttcttcacctaaacgtgccattttttgaagattaggggaaggttgattaccaaccggggtcaagtcaaacttgaaatccccagtttcaacgattaccccttgaggtgtatgaatcgcaacccctaaagtatcaggaattgaatgggtagtccggaagaaatcaacacttgttttgcggaatttaaggacggtatcttcgtttagttcgtgtaattctgttgaccgcaaaaggccgtgttcttctaacttaccgcgaatcaaggcaagtgccaatggaccagcgtagacgggtacattagggacttgttgcaagaagtaaggtaaaccaccaatgtgatcttcatgcccatgggtaatgacgagggctttgatcttttgttgatttttttgaaggtattgatagtctgaaataacataatcgatccctaagagttcatcttcggggaatttaatgccggcatcaatcacaataatttcgtcttggaattgaacaccatacatatttttaccgatttcaccaagtccccctacggcgaaaacggcggtttcgttattcttaatatcgagtttcatttaattaaaactccgttaatttaaaatcttctgattcttgttcaaaagcaaggtgcttaccagataattcttgtacaaattcaatattgtagggagtattgtcttcaacaagttggcgtgcttcaacggcactgtctgcttctaaatagatcgatttagttgcctcgcgtagagggctttgggttttgtctgcttggaaaagtactttataaatcaattgtaaaactcctttattattcatcatagttttaaacgaaagattaaccgtccaggggttgattactcaacatttaagaatattttagcatatcttttcggtaaagtatacattgagcgacgtgctctaaatagcgtgtttgcctcgattcggttataattatcatattagtgagcaatagaagtgggggattgttatgttaatttggttgtcagtcgttatcattgtcgcgttagcgctttttttaacctggttgattaaacggttacgccgacaaagagcgacgcggattttacaacacagtagtcaagaaattgcggatgaaattgcaacggtggcttatcaaaaaatgcaagcgagtcagccggatttttatgcaccgcaagccaaactggtttcgaacctgcccactgaaatttggggcaataatgtgatggtcttcgaataccaagtgcccatccgacaaacatcatctgcattaaaggatgtggcagccgcaattgaggaacaactcaatgaagtggcttacgaacggcggattgcctccgtcagtccgcgttatccggctttgctagtcactgatgtgtggtttttggaaaaacaattgcattttgacgttgcttttattgtcaatcgcgaaacaatcgagtatgttaaagatatggcacaggtagaagattaaatttgaagtttagaaggagtttgcaccgatgaaattaatgtggcgctatacgatccgatataagaaattactattttggaactttatttgtgtatttggatttattctaatcgaattgggattaccaacgttattaggacaaattattgataaaggaattaatcaacatacctttggtcctgtgtggcaatttgggttattgatggttggaatctgtttaatcggactaattggcttaattggcttggcttatactggtagcaaattaaccaccaatatcgtccgtgacattcgtaacgatatttttaaacaaaccatgcagttttcccatagtgagtatggcgaatttggtgtgtcttctttgattactcggaccactaatgatgctttccaggtgatgcaatttatgacccaagtgttgcggacagggtttatgaccccgatgatgatcgtcgcgagtgctttcatgattgtacggacaagtcaatcgctctcatggattgtatttgcggcaattccaatcctgctaacgggggttgtcttgattggtcgcgtttctgaaccgatgtcgacggaacaacaaaaaaatctggatgcgattaatctgaatctgcgtgagaacttgactgggattcgtgttgtccgtgcttttgtgcgggaacaattccagaaattacgctttagaaaagtgaatgatgactacagtcatagttctatccggctgtttacgttggtggctttagcacaaccgggcttttcgttcatctttaatatcgtattcgttctaatcatttggcaaggggctgttcagattgatggtggtcacttagcggttgggacgttgattgcgtttattgaatatattttccacgtactgttttcatttatgttatttgccagtgtcttcatgatgtatccacgggccgctgtttcagcagaacgaattgaaaaaattctgaatgcgccaattaatattaccgaaaaagaagacggggtaacaacaaccgacacacaaggtgaattggtgtttgataatgtctcctttgcttatccaggtccgactgaaagtccggtcgttcgggatgtgacgttccaagcgcatccgggtgaaacggttgcctttattgggagtaccgggagtggtaagtcaacgttgattcaattgattccacgcttttttgacgtaacacgtggatcgattaagcttgacggtcatgatgtgcgcgactatcaacttaaggcgttgcgccaaaagatcggttttattccacaaaaagcggtgttatttaccggaacaatcgcggaaaacttgcgttatggtaatccgaatgcgactgatgaagaattatggacagctttgaaaattgcacaatcagatacctttgtcgctgaaaaaccagacggcttacaaacttatttagccgaaggtgggagcaatttatctggtggtcaaaagcaacgtttggcgattgccagagcgattgtccgccgccccgcgctttatatctttgatgatagtttttcagcattggattataaaacggatgcggcgttacgaggtgcattgaagtcaatcaccaaagaggcaacagtgctgattgtggcacaacgagttgggactatcatgaatgctgatcggattgtcgtcttaaacgaaggtcaagtggttggtattgggactcaccgcgacttattaaaagataacgagatttatcgtgcgattgcggcatcacagttatcacaggaggaactcaatgaagaatattagagaacttaaacggctaatgcgctacattgggccgtatcaagtgacattttggcttgcgattaccgcaactgttatttcggtgctcgctaatgcactgtggccagtgatcatgggactagccattactgaaatcagtcggaatttagcacaacacgttgcgattaattttagttatatcgcgaaggtgattgcgatgattttgagctttgcgttgctatatcaagtgacgatgtttttaggctcgttttggatgacgcgggctgttcaacgggcgatgcgtgatttacggcgcgacattgatttgcaaatcaatgcgctacccgttcgtttttttgattcacaacaacaagggaatatcttgtcacgggtaaccaacgatgtggacgcgattacgaacgctttacaacagagtttaattcaagttgtgacatcgatcttagggatcatcacggccgtgatcatgatgattacgattaatatttggatggcgctcttatcattaataatgattccagcatcgttattgatttcaagacgggtcattcagaaatcgcagccgtactttagaggacaacaagacacgttgggcgaaatgaacggctttgtacaggaaaattatggcggcttcagtgtcttgaaactttacggacaagaagaacgcgcaattgctgcttttgcagaaattacggatcggttaactgactatggctttaaggcagcctttgtttctggcttgatgatgccgttagttggtttaacgacaaacatgacgtatgccgggatggcaacgttaggtggttattatgtcttgcacggtgtgatttcagttggtaatttacaagccttcattcaatatatttggcaagtgaaccaaccaatctcacagattacacagttgtctggtgtgattcaatcagctgctgctgcaactggtcgtgtatttgaaatcttagatgagccagttgaagcaaccgataatgaaacagcatcgttgccagcaatcgttcaaggtaaagttgaatttgatgatgtcagtttcagctataacccagacaaaccattgattcgccatttgagctttactgctaacccaggtgataaagtggcgattgtcgggccaaccggtgctgggaagacaacgatgattaacttgttgatgcgtttttatgatgtgacatctggaacgattcggattgatggggttgacacgaagcaattaagcaagcaacaagtccgttcccaatttgggatggtacttcaagatgcttggttatatcatgcttcaatcaccgataatattcgtttcgggaaactcgatgcgacagagtatgaagtcgttgatgcggctaaaaccgctaatgtcgatcattttatccatacgttgccaaacggctatcaaatgacgattgatgaagaagcaagcaacgtttcgcttgggcaaaaacaactattgacgattgcccgagccgtgattgcggatcctaagattttaatcttggacgaagcaactagttcggtggatacccgattagaaggtttattgcaaaaagccatggaaaaagtcatgcaagggcgaacgagtttcgtcattgcccatcgactctcaacgattcgcgacgcggatttgattttagtgatggaccatggtcaaattgttgaacaagggacgcacgattcgctattagctgccggcggtgtgtacgctaatttatataacagtcaatttgccgatacgcctgaagcggcggaagcataaaaaaagcatgatcgaaatcttctaatgagatttcaatcacgcttttttatgtgcttctcgagtagcctttaccgttaagcctcaaagcctgaccaactcgaatcagcacttcttctttaacgtgcgcttgggtgcaacaactcccgtttaatctaaaattggcagttatcccacaattcgggataactgccaattctgtattaatgctcagttgctaagcacaaccaatcgcacttctattcaataataatcatgtcatctggtgctgcgaatgggtcttgcttgttgatgtgatcgaagaacaagatgccatttagatgatcgatttcgtgttggcacacaatagctgggtagttttttaagcgaatcttgtggctttcaccgtctaaatcttggtaacgtagtgtaatacggtcagggcggggcacaaagccgggcacttcgcggtcaactgataagcaaccttcaccttcagcaagtgctgcgttttgaacagagtggctgataattttagggttgataatcacatctttgaagatgggttcgtctggtccagggaccaagacagcagacatttgttttgaaacatctacttggggtgcagctaaaccgacgccagcgcgcaagtggtacttttcagcaagttcaggatcctggctattttctaaaaatgccatcatgtcagcggcaagttgccgatcttcatctgatagcggaaaagtaacaggttcagctatttttctaagtgttgggttaccctcgcggataatatctttcattaatatcacagttaagacctccgattaattcgtcattcattattctagcacaattcaagttaaaacggaatgaattgcttgacctgctaaagtgaaacgggtagtataagagtatagatatattgcttttccgttaggtgaggctcctatatgaacaaacgctgctactcagaaacatcgagagatgccaattgagtcaactgaaactgccaatgaaggctttttctaacgtagctgaacatggtttctacgtcatatagtgctaaaactgaacgattgggaacgccatgataaatggatgacgctcaattgttgtgcgtctttttttgtcggataaagcggtatgactaaatttaaagtagagaaagtctggtgagtaaaatgatgaaaacagctgaaggacctgtaagtagtagcgatggtgatcattcgaggtggtctgtcattttactgccagcattaggctagcggtttacgacgacttcctcaaaagggaaggagtgtcgaacgcgatgcacaagaaattaaaaaaagacgttaacatcactggcattacaagcagtgggatgttaatgcgtttattggcaactcggccaagtggcttaacaactgtcgaagctgctaaaagagaagcagtattagaaaattcacaagcacgggttagcgttatgcgtgatggttttttacgcttaatcggtgcagatcaaattgtgcccggtgatattttagtattggctgctagcgaaaagacacccgttacaatcgcaacagttaacaaagatgttaacgttattgaagcgggcgaagcagtgactgaaatggtgcacggcgttgtgctagatgcaacgattggtgctaaagcacaaacacctaaagttagagtgggaagcacttttatgatggcggtagctgcattggtttcgttttgtgcagtattaatggttaatcaattcgctttcatgggcttggcaacgttggttgtcggggcaatcctgctgacaatgattaagttagtcaaccttggtcaaattaaggttgcgattgatttaaatgatttgcgggtaagtgaacggtgcgtgcaagtcagtcaacaaattaaaccagtagtcagagtgtttcaagagctcttagtgcatgctggcaacgctgagataccccaaccggtcttggcatagaactaccccaacttaaatttaacgatgagtctgctacggcggactctttttttgtgcctattatttgctattatataacagaaaacgaaattaaattataacagatatagaacagacgtgaaaattagctaactagtgattagattcacatgtaataaaaactaatgaaagcgtaaactgactaatatagcttataaaacgcttgcatttagtgatgtgaaatgctaaattagtcttgtaaagatgcttaagtaatacagatataagcagtcattaaaacagttttttaaagaggagatatggatactatggtcaataataaagctgcagttaattttgaaaagttattgagcgatgagagccaagattttaagaccgttcaaattttagatgagactggccaggttgttaatccggaattgatgccggatctcagtgatgaccaattggttgaactgatgaaacaaatggtttggtcgcgtgtgcttgatcaacgagcaactgctttgaaccgtcaaggccggttaggattttatgcaccaactgctgggcaagaagccagccaattagcaagtaactttgcgatgactaaagacgactttttattccctggttaccgggatgtgccacaattagtgcaacatgggctacctttatcacaagcattcctatggtcacgaggccatattgacggtaacaagtatccagaatctttgaaggcgatgccaccacaaatcattatcggcgcgcaatacattcaagcaatgggtgttgcggttgggatgaagaagcgccaatcagaaaatgctgtttacgtttataccggtgacggtgggacttcacagggggatttctatgaaggcttgaactttgcgggtgcttttaaagcaccagccattttcgttgttcaaaataacggctttgcgatttcggtcccacgtgaaaaacaaacagctgctgtaacgttggctcaaaaaggggtcgcagctgggattcctgccattcaagtcgatgggatggatccactagcagtttatgaagtgatgaaagaagcgcgtgaatttacaactgctggcaacggaccggtcttaattgaaacattaacctatcgttatggaccacatacattatcaggggatgatccgactcgttatcggaccaaagaaacagacgatatttggttgaaacgtgatccactcgttagaatgcgtcgtttcttaactgataagggactttggtcacaagatcaagaagaccaattgatcgaacaagttaaaacagacattaaagcagccatcaacgaagcggatgctgcgccaaaacaaaaagtcacagatttcttgaatgttacatttgaagaccaaccacaaaacattaaagaacaaatcgcagagtacagtgcaaaggagtcgaattaagatggcacaaaaaacgatgattcaagcaattacaaatgcgctggatttagaacttgcagatgataagaacgtcttgattttcggggaagatgttgggaagaacggtggggttttccgagcaactgaagggttgcaagctaaacatggtgaagaccgcgtttttgatacaccgttagctgaatctgggattggtggtttatcaatcggtttagcactagaaggcttccgccctgtacctgaaattcaattctttggtttcgttttcgaaacaatggattcgattgctggccagatgtcacggacacgttatcggatgggtggcacacgcaacatgccaatcacgattcgtgcaccatttggtggtggcgtgcataccccagaattacattcagataactttgaaggaatgatcacgcaaattccagggattcgcgtggttgtgccaagtaatccatatgatgccaaaggcttattgatttctgcgattcgttcaaacgatcctgttttgtatcttgaacacatgaaattataccggtcgttccgcgaagaagtacctgatgaatcttatacagtgccgcttgataaagcagctgtggttactgaagggacagatgtttcaatcatcacttacggtgcaatggtgagagaagcgattaaagcggccgaaaacctagctaaagagaatattaaagctgaagtaattgatttacgaacaattgcaccattagatgttgcaacaattatcgcctctgtcgaaaaaacagggcgggtcgttattgttcaagaagcacaaaaacaagcaggcgttggggcacaagttgcttctgaaatttcagaacgtgctgttctttcattggaagctccaattgcacgtgtttcagctcctgatacgccattcccatttggacaagctgaagcaacttggttaccaaatgcaactgatattgaaaataaggttaaagaagttattaacttttagtcgataacgaaagaagggacgttagacgtatggcatatcaatttaaattaccggatattggtgaagggatcgcagaaggcgaaattcaaaaatgggcagtcgcagaaggtgacacgattcaagaagatgatgtcttacttgaagttcaaaatgataaatcagttgaagaaatcccatcacccgttagtgggaaagtcgttaaaattttagtcggtgagggtgaagtggcaacagttggccaagtactggttgaaattgacgcaccaggtgttgaaggtaacgatacaccaagtacggcaacaccagctgctacacccgaagcagcaccgactgcaaccgatgcaggtggtgtttaccaatttaaattaccagatattggtgaagggattgccgaaggtgaaattcaaaaatgggcggtcgcagaaggcgataccattcaagaagatgacactttattagaagttcaaaatgataaatcagttgaagaaatcccatcacctgttagtgggaaagtcgttaaaattttagtcggtgaaggcgaagtggcgactgtcggtcaagtattggtcgaaattgatgctccaggtcacaattcggcaacggcaacatctgctgaacaagcaccagctacggcgtcagaatcaacaccagctaaaacaacggcgccaagcagtcaagcagtagttgcgattagtgaccaaaatcggacgattttagctatgccatctgttcgaaaattcgcacgtgaaaacgatgttgatatcagtcaagtgccagccaccggtaaacatggtcggattactaaagaagacgtgcaaatcttcatgcaaaatggcgctgcaacaacgacagcacctgctgtagagacagcagaacaaccaacgtcgccagcaacaccagttgcacaaccagttgctgcgacaccatacacctctgttacaccagaacgggaaacacgtgaaaaaatgtcaccaacgcggaaagcaattgctaaagcaatggtgacaagcaagcatacggcaccacacgttactttattcgatgaagtggaagtttctaaattgatgacccatcgtaagaaattcaaggatgtagcggctaagaaggacattaagttaaccttcttaccatacatcgttaaagctttggtaacggtcttacgtgacttcccaactttgaacgcgtcaattgatgatgcaactaacgaaattgtttataaacactacattaatgtcggaattgcaacggatactgatcacgggctctatgtcccaaatatcaaggatgccgacagcaagagtatttttgccatcgctaaagaaattggcgaaaatacgcaaaaagcattggataacaaattgaaaccagctgaaatgagtggtggttcaatgacaatcagtaatatcggatcaattggtggcggttggtttacaccggttgttaactaccctgaagttgcaatcttaggggttggccgaattgggacagaaccaatcgtcaacgctgatggtgagttggctgttggcaaagtcttgaaattatcactatcatttgatcatcgtttaattgatggtggaactgcgcaacgtgcgatgaacgaattaaaagaattattagctgatccagagctattattgatggaaggatgattttaaaatggttgtaggtgattttgcaattgaattagacacagtagtcatcggttcaggtcctgggggctatgttgcggcaattcgcgcggccgaaatgggtcaaaaagtaactgtgattgaacgtgaaacaattggcggtgtttgtttaaacgtcggctgtattccttccaaggctttgatttcagctggtcatcgactacaagaggcgaaagattcatctgtctttggtgtgacgactactggagcaacattggattttgcgaaaacgcaagactggaaacaacatgaggttgttgaaaaactaactggtggcatttcaatgttgttcaaaaaacacaagattgatgtgttagacggttcagcctttttagtggacgaacatagcttacgcgtgattaaagaagagagtgcacaaacgtacagttttaaaaatttaatcattgctactggtagtcgtccaattgaaattaaaggcttcaaatttaataaacgggttattgattcaactggtggtttaagcttaacggaagtaccaaaagaattagtggtcattggtggtggctatatcggctctgaattagcaggggcctatgccaacttaggtgcacatgtgacgattctcgaagggacagactcgattttacctaacttcgaaaaagatatggtgcaattggtgacaaagaacttcaaggctaaaggggtcgatgtgattactggcgcaatggcaaaagaagctgttgaaactgatcaaaatgtgacggttaaatatgaagtcggcggcaaagaagaacaacttgttgccgattacgtgatggtgactgttggtcggcggccaaataccgacgaaatgggactcgaacaagccggtattaagatggctgatcgtggtttgattgaagttgatcaacaaggccaaactaacgttaagggcatctatgcgattggcgatatcgttgctggagcagctttggcgcataaagcaagttatgaagctaaagtggctgcagaagccattgccggtaagaaagtaacggttgattaccacgcaatgccagctgtttgttataccgatcctgaattggcaacgaccggtttaacggttgcagaagccaaggcaaaaggaatgaacgctaaaggatttaagttcccatttgcagctaatggccgtgctttatcattagcagatacagaaggtttcgtgcggttagtgacgaatacggatgacaacacagttctgggcgctcaagttgctggcgttggcgcgagtgatttaatttctgaattgacgttagccgttgaatcaggcatgaatgcagaagaccttgctctaaccattcatccacatccaacgttaagtgaagcgattatggatgatgccgaattagcattaggattgccaattcatatttaataaatagtttagaatgacgacgcaccagttgagtgcgtcgttttttgattccgctatttctaaaaggattcgacagcttctaaaaaagtgcgttataatatgagagattaatggcatcagttgaattgaaactggcgcaaatttatgcaaattttaggagcctttatgcaaacgaactatagttatcctttagaaccagactggacgccaactgaagttgtccaagtcatgaaattatataatcttgttgaacaagcttatgaatttggtgcgaaagttgcggatttacaagctgcttatcgtgacttcaaagtggttgttcaaagtaagatgcaagaaaaacaaattgataaggccttttcagaagcgtcaggctattcaatatatcggtgtatgcaggctacaaagaagagtagtcgaacccaaatcaaaatgacgcttaattagtgaaagtggatgaaaaaatggaacaagaagcactgtatcggttaagtcgttcgctgcaaaagtggatccttgaagcagctgcctatacccgcacacaaattaaacaaccattaacggttagtactaagtctgggcctaatgatttagtgactaatgtcgattgtgctaatcaagctttcttagctgaaaagattaagacggcttatccgaacgcgcaattagtgggggaagaaggtgccggtgaggtgcctgatgattggcaacagggactaactttttttattgatcccattgatggcacgatgaatttcgtgaagcaacgggcaaatttcgccattatgatcggcgtttatgaagacggtcagccgctattcgggattatttatgatgtgatggccgatcaattgttctggggcggtccacagttgggaatattcgaaaacgaagctgccctcaaaaatgctgtcgacgagccgttgcaagaagggttaatctgtgtcaatacacggatgctggtcaccaatgaagcacacttgcaagaggtgttgtatcaatgttcgggtgtgcggatttacggtagcgccggtatcactttcgcccatttgttgaaggggcaagtgcaagcttacatctccaaattagcgccatgggacattgctgcaggtcgggttttagctgagacgttaggttttcaagttttacaatttgatggtcaaccaatttccatgatgcgaaaagaagggatgattatcgcgccaaagcaagcaatacaagaaattgtcacgattatgaatggttcaaatgattaaagataattaaattttcatgaaaaaaacttgcgtattttcaaaaaaacgctaatatatgaagcacagcccatttttttatggtaaaataatagcttgtatacatgagacaaacaacactagtcaagtcactagcgagaggaagctgaaacacttgaaaaaaagagaagacattcgcaatatcgcaattatcgcccacgttgaccacggtaaaacaactttagttaacgaaatgttaaaacaatcagatacattggatggtcacgcagaaatttctgaccgtgcaatggatacaaatgatatcgaaaaagaacgtgggatcacaattctttcaaagaatactgctgttaaatataacggcaaacaaatcaacatcttagatacaccaggacatgccgatttcggtggtgaagtggaacggatcatgaagatggttgatggtgtgttattagtcgttgatgcttttgaaggcacaatgccacaaacacgttttgttttgaagaaggctttagatcaacatttaacaccaatcgttgtgattaacaaaattgaccgcccaggcgctcgtcctgaagaagtcgttgatgaagtgcttgaattattcatcgaacttggtgctgatgaagatcaacttgaattcccagttgtgtatgcaagtgccatcaacgggacatcaagtcttgaatcagatttagatacacaagcccatacaatgaaccctatctttgacacaatcttagatacaatcccagcaccagttgataatagtgacgaaccacttcaattccaagtggcaatgttagattataacgactatgttggccgtattgggattggccgcgtttctcgtgggacaatcaagatcggtgatcaagtttctgttcttaaacttgacggttctgctaagaacttccgcgtaactaagatttttggtttcatcggtttagaccgtgttgaaatccaagaagccaaagcgggcgatttaatcgctgtttctgggatggaagatatctatgttggggaaactgttacaccagttgaccatcaagaggctttaccaatcttacggattgatgaaccaaccttacaaatgacatttgctgctaatgattcaccatttgttggccgtgaaggtgatttcgttactggtcgtaagatcgaagaacgtttacgtcaccaattacacactgacgtttcacttcgtgttgaagataccgacaaagccggcgcttggattgtttcaggtcgtggggaattgcatctttcaatcttagttgaagaaatgcgtcgtgaaggtttcgaattacaattgtcacgtccagaagttatctatcgcgatattgatggcgttacatgcgaacctttcgaaatggttcaaatcgacacacctgaccaatatacaggctcagtaatcgactcaatggcccaacgtaagggtgaaatgcaaaacatggaaagtgatgctaataaccaaacacggatgactttcttagcaccttcacgtggtttaatcggttattcaacagaattcttaacgatgactggtggatacggaattatgaaccataccttcgaaaaatacatgccagtgattaagaactgggaaccaggccgtcgtaacggtgcattagtttcaatcaatgcgggttcatcaacaacttatagtttacaatcagttgaagatcgtggccaattattcatcggcgctggcgttgatgtttatgaaggcatgattgttggtcaaaacagccgtgatacagatatcgccgtaaacgttactaagggtaaaaacttaacgaatacacgtgcttctggtaaagatcactcagctgccatcaagacacctaaagaaatgtcacttgaagaatcaattgaattcttaaacgatgacgaatactgtgaagtaacacctacttctgttcgtttacgtaagaagattcttgacacaagtatgcgtcaaaaagctgataagaaacgtaaaaaaggttaatcattaaaaaccattagaggtagccgcttggctacctttttttgtgcataaatatggtataataacgaacagagtatgctttttaataacgaataggtaggcgtaaattatgattgaacaaaaaacaacagcttatctcactttagaagcggatgcgctacgcattgagcaactattgcgtgctcaaattgatgcgctttgtatgagtcaatgtccaattattgaagaggtaattgatacccaattatttggtttctcgcgcgaggttgattttgcaaaacggatgcaacttattagtgcgccacagggtgcaactttgatgcgtgagttagaagaacgggtcaatcaaattggcatgcaagttgggcaaggacaggctgaatacgaacgaaatagaaattaggtgtaactgtgtggaaaaagtttcaaaaaagtaaaattcagtatttagactattggttattgctaccatatgttatcttatgtgcatttggtgctttaatggtctattcggcgagttcggatttaatgtcaattcgcggaatgaaaccagatgcgtattttaccaagcaattagtgtttatcgcattaggctttatcttgatgatgatcacatattttcttaagttatccgttttaaaaaatcgcacttttctaaaagcaatgacgattgtggttttcttggcgctcatttatttattgctgttaagtcgtttcagaccaagcgcagcgattaatggggctaccgcgtggattcaattgggaccactgaccattcaaccgtcagaatttacgaagttattgattgttatttaccttgctaatatgctctcgcgtaaggaaaatgaactggccgacggatttgttgataatttaaaattattctttagtccggttgtattagtcgctggaatcatcctactggtgtttattcaacctgatttagggggcgctagtatcttggctgctgtgatggtagtcatgttttttggcaccggtatgtcatattggtatggtttttcgctgattacagcggtcacaacaacggttatgattttatttagtattttacggcactttaacttttcaacgaacgttaattcttataagttcaaccggattttatcgtttttacatccatttgaattggaaaatatgggtgggagtcagttagtgaattcctactatgcgattaataatggtggttggtttggcttggggcttggcaatagtatccaaaagcgcggttacttaccagaaccgtataccgattttattttatcgattaccactgaagaattaggtgtgattgggaccctcgtgattatcgcgttactatttgcgctactagcacggattttttacctagggattcatgcgactaagatgtatcacactttattatgttacggaattggcactatcattttcgtgcaaaccctattcaatgttggtgggttgctaggaatcttaccgattactggggtgacgttaccgttcatcagttatgggggatcaagtatgatggttctagcgattgcactgggaatcgtgttgaacatcagcgcacaagagaaaaaagctgcggcagcgaattagtgaggtgaaagcatgataaaaggggcacgccgattaatcgttgcattgattgtctggttggtcatcctttatggttggccgattatccaaacaccagcggttaatcagcctaaggttgcacaagccccgtcgactgaacggtcaataaaacaaacgccactgacgaaaacacaagggccggcgaaactgattaatcaaccagctgaacaattaattgcaacctatgggcaaccggtcgagcaacagctgactgatgaaaatcaacgacggtggttatttcacttagatagccgacagtatgtcgaagcgctgattgataaccaatccaatcaaacacaacaaatcatggttgttggtgcggacaacgatgtggcgccgtttcatttttttcaaaagcgggctacattaactaagaagacggcgttaccaacttcgctcttagtgacgttacacgagcaacaatttaagttgcggttaacgccggagcaacaccaacaaacgccgttagtgatgtttaaaaaccagacgtttgcaactttagtgatgcagcaagaacgattgacagctgtgatgtatttaaatgcgaaccgactgctacaaactgatttatatcgagttgtttcaaaaacaccagtcccagtggatgagctagcaaagtcgcaacaaccgcaaacagatagtcaacgacaactcgctttggtgcaaacgttgcagacattacgccaaaataatgaccaacctgcgctcacgataaatcaactaccattgcaaaatacacagaatttggtgagtgaattaacaagtacaccaacgcagtggttgactaaaaagggactgcaaaagctgcaccaagtgcgcaaacaagcgacacaagagacggacgcctttttaacagcaaccgactttaaacaggctccgttaagagcagcgggttttccgcagcgcgagcaacttttttattggccacaagggctcaattcccaagggctggtgcttgcgcaacaacagaatctagcgttgcaacttgcgattaataatccaagctatcagcacttaacgcttctgtgtaccgatgaacaaacaatgatgatttttgactaaatgtaaaaggactgattaaatgacattggaaatcacacaacgccaaggaattgtcgtctggctctattcattacgacaagtaaagcaattacgccgttacggacttgtgtattacacctcgaaacgaatgaaatatgtttatctatacgtagatatggcagatgccgaaactgttatgcaacggttaaaaaaattacactacgtcaaacgagtgaccccttctgaaagaccagctattgatatggatttcagtaatcgagtaggacgctcagatcaagaaattgccgatgcggcagaattagaggagtaatagagatgcggattattgcaggagaatttgggggtcgcaagttaaaagctgtccctgggatgaaaacacggccaacaacggacaaggttaaagaagcaatgtttagtatgttggggcaattttttgacggtgggcaggcgcttgatttatatgccggtagcggtggtctcgcaattgaagccgtttcacgcggtatggatcatgcttatttagttgatcgccaatatgcagcgattcaaacgattgaagaaaacgttgcggttactaaaatgccagaatgctttacaatctggaagatgccagctgaaaaagcgttggtgaaactagcggatgctggtgttcaattcgatttaattttattagatccaccctacaaggaacaacagatgttgcttcagttacaacaattcgtcgaaatggggttattagcaccagacgcgacgattctttgcgaaaccgatacgacggttgattatccaactgacattctgcattacatactgaaacggcaacagaattatgggattacagaagtagcaatctttaaatttattggttaggaggcagctatatgccgaaaattgcattatttccgggaagttttgacccgtttacaaatgggcatctcgatactgttgaacgggcaagtcacttgtttgaccaagtgattatcgcggtgatgactaacgctactaaacaaccgttatttgacgcaaccactaaggttgaactgattgaagcggcgacgcaacacttggataacgttaaggtaatcgcacaatcgaagacgttgacggcaacctttgctaaagaagtcggtgcgcgatatttgattcgtggtattcggaatgccaatgattttgagtatgaacgtgatattgcggcgttgaatcagacacaagatgctgatttagaaacggtgttattattagcaaagcaagaatttgcttttatctcatcaagtatggtgaaggaaattgcaacgtttggtggccaggttgaacaattggtgccgccggttgtcgcgtctgcgcttgcacaaaaattaggacctgaaagtgattaatatgaataagaataaacgtctattgaagcatctcctatggattgttggcttgatcgtcgtgtttgctttttgctttatcccaacgcattattacgtcgaaggggtcggttcggccgaaaataccaaccagtttgttaaagttaacggtcaacgagatcagcataagggccactttatgttaacaaccgtcgggattcaaggaccagtgacggggttacagctattactgtctaaaacacaaccttttacggagattattagtcgtgatgaactaatgggtgacgatgatactgaagcgtatgatcagattcaaaaatactacatggaaagctcgattaattttgcgattgaggcggcttatcaaaaggcacatcaggaataccacactcaatatctgggtgtctatgtgatgtcaattttagataattcagcttttaaaaaagatctggctattggtgacacaattacggcaattgatcagcatcaatttaagagtgcaaataagttcgtcaagtatgttcaagggcttaaagtgaatcaaaaagtcacgattagctatgaacataatggccagcgtaagactgcgacccgtaaattgattaaattacctaaatcgcgctacgctggtttgggaattacgctgacagatcactcaaaaattgtgacaaaagtgccggttaagattgatgcgggtgaaattggtggtccttctgctggcttgatgtttacgttacagatttataaccaattaacgaaacaaaacttaacgggtggtcgcaagatttccggaacggggacaatggatcctgatgggacagtgggaccaatcggcggaattgataagaaggtactgattgcgagtcaagaaggcgccaaagtctttttcgcacctgatgatcccgtgacaaaagccatactaaaggtagaaccccattatcaaaataattatgcgattgccaaagcagccgctaaaaaaattggtactaagatgaaaatcgttcctgtcaaaaacttggacgatgcattggattatttagccaaacattaaaaaatttgtcggttcgaaagaatcggcaaattttttttgcgttttggggtaattaggaataaggaggtggcgaaaaatgtggcgcgactattggcaacggtatcgtcgattctggtgggtaccttgtttggtgataattttacttggtggtggtgtgttttggcagcatagtcggcaacaacgttttctatcaaccaatcaacaattgatggcgcaatcaactaagcgaaaagtgaaggcaaaacccgtcaaacagaagaaaagcgtctcaaaaggtgggtttgtcgatatcaaaggcgctgtggcacatccagggatttatccgatttgtgttgcaaagacgcgtttatttgaggtgctgaaacaagcgggggatgtgaccgaagcagcggatacgagtcagttgaacttagcgcaaacattgagtgaccaacttattatctatgtgccaactaagggagaagcggtgcaagccgaagaattagtgaaagcggcagacgagccacaggctgcgactgacaatcaagcgggagccagtccgatatcaactgatgctaaaatcaacctaaaccaagcggatgcgacacaattgcaaacgctaaatggcatcggtcctaaaaaagctgaacaaataattgcatatcgggatgagcaagggcagtttaaacaaatcgaagatcttcaaaaagttgggggaattgggccgaaaacgtttgaacaattacggccacaaatttgtgttaattagtttgtgaatggtatttttttgctatactaaaactattaactttaaagggggaattcgtgtgtcagaaaagagaatgccgtggaatcaatattttatgcttcaatcggtcttgttgtcgatgcgtagcacctgtccaagattgtttgtgggtgcgttggtggttcgtaatcggcgaattattgcgggaggctacaacggttcggtggcacatgaaagtcactgtatcgatgttggctgtttattacgggacgggcattgtttacgaacaattcatgccgagatgaacgccttgactcaatgcgctaagtttggtgtgcagacggaaggggccgaaatttatgtcacacattttccatgtcttcagtgtactaaattaattattcaagctgggatcagtaaaatccattatcaaaaggattatcataacgacgaatatgcgtatgaattgattgaaaaatctggtattgaattggaccaagtcgatttaacggcgaatgacgccaacaccctcgttaactttttggagaatgaacaaactgctgagtgattaagaataactgggtttatccagttatttgtttagcaagtttaaatgcgttattactaggacaagcaccacttttttttagctgtcttttgatagtgtgtctactgcgactgtggtgcttacgccaaccagctgtgttaatggtcagtggactggtactgtgtttaggcggttgccgtttttggctggcacggcgcacctacgaacagccggttagaccaaataatcaagtatataagattcaacccgatacgatcaaagtggctggcgatcagattcaattaatggcgcaggggcagaatgatgaccaacgtgttgtttgctactatcgctgccagagttcagcggaaaaacgccgttggcaaacgacgaatcagccgttattattagcgggtgatattgaattagagcgtatccaaggtgctactaaccggaatgagttcgactatgcgcgctttatggggcagcaaaagcattgtttttatcaagcaaatataattgacggaacggtctttagacgcattccaccacaaggttggctagattggttccaccaacggcgccaacaggggctgatttatctccgacaattgccaccagcgttgagttttcatgcagaggcgttgttatgtggtgttcgagagtcagatggcctggcctaccagaatgtgttaggtcaattggggattattcatttattgagtttatccggattgcatgtattctactttgtgacaatcattcgtcgattggcaacgctgtgtcgagtcccgcgtgaatgggtgaatgttagcttgttttgtttgctacccctttatgcgttgtttgtggggggaggcacgagtattacacgcgctatcgggctgatcttactacgattaatctgcgaagtaagtcattttcagcaatcgcgtttagatagttggagttgggtattgctggtcaatcttttatggcagccgtatttattaatcagtatggggggattgctgagctatctgatggcttttggattgatttatcagcggcgccatggtacttttacaacggcattttggctaggcttgttaagtttaccggtgtgcttgcggtttaattatcgttggcatatcttgacgattttgattaatgggattgtcgcgccgattttcttaccagtcatgttgggtttgattatggtagcgatttgcttatggcctgttagtcatatgatagtttggttagaagaaggcctgctaacgacgctgtataaaggattagcttggattgcaacgttcccatatgcgacaattactttcggtaaaatccagctaataccactctttttaattgtgataggcacactatggttgatggcaagtactggtcggcgagcaaagtggggctggggggctgttatcagcctgtatgtcattagttttattggtatccactttaatccggttggccgcgtgattatgtttgatatcgggcaaggcgatagcctgttgattcaacaacccttcaatcgacataacctgttaattgacaccggcggccgactagctttaccgcaagaaaagtggcaacggcggcaaattgtgagtcgggcggaaaaagtaacagttaattacctctacagctgtggcattgatcatttagaggcaatcgcattatcgcatcaggatgctgatcatataggggacttaaatgaaattatgcaacatatccgagttaaacggttgatttgtgctgcgggcttaccgcaaaaccggcagtttcaacggcaagtgcggccgcatcttacaaaagttgcaattgagccttatttggcggaccaacattttatgattggtcaccaacaaatcaatgtgttagcgccagtggtggccggaccaggcgggaatgctgactcactcgttttgcaaacgcaaattggtggtgcgagttggttatttactggtgatttagaaaaagcgggtgaagtggcaatcgttgatcgctacccacaattacgtgttgattacctaaaggtgggtcaccatggcagtcaaacggcgagtgatcccaagtcaattgcgacgtggcaggtaaaaggggcgttgatttctgcgggacgccataatcgttatggtcatccacatgtcgcaacgttgcagactttaaaacgtgcgaacgtcccattttggaatacggctgactgtgggatgctggaatggcgctatggttttggccaagtgccaatgattaaaacaacactaaaggattgtgactaaatgaagacagaacaactaaaaacagcactgaatcgaggaacgtttgcaccggtgtatctcgtattaggacaagagtcagcgctgattgaagaggttagagcgttatttaaagcaacgctttcgacagaagaaatgacgatgaactttgcgagttatgatctcgcccagacggaggtggcgcgggcattagaagatgcggaatcggccccctttttcggtgagcgacgaattgtttttatgcagaatccattcttcttaacaggtgaaaaagttaaaactaaacttgatcatgatttaaaaggattccaagcttatttagaacagccacaaccgacaacggcactcgttatcttcgcgccatacgcgaagttggatgaacgcaagaagattgttaaacaactgaagaagatggcaactgtcattgacgttcaaaagattaatgagcgccaggtccagcagttagtgacagcgcaactgcaaagtgaacaagtcacgattgaaccagcggcaatgacgttattgttaagcaagactaatggtgattacagtcagattatggctgagttacccaaattactgctttacgcgcaacaaagccgggtgattactgaaacggccgttagtgcattagtggcaagtagtattgaagataatgtttttgaattggtgccgttagttttacaaaaaaaggtcggtccggttttagagatgtatcacgatttattgctacaaaaagaagaaccgctgaaaattaacgccatcttgttgggccaatttcgcttgttactccaagtgaaaattctttttgaaaaagggtatagccaaggtaatttggcgagcgtcttaaaaattcacccataccgcatcaaattagcattgcaacaaattcggcacttttctaaggcgacgcttgcccaagcctatctaggtttagagggcattgaagaaaaaataaagactgggcaaggtgaagcaaccttattgtttgaactgtttatgttacaatttgcgacagatgatgttgcttaaagcaaaaaaagcccccacaaaccaaatggttgtgggggcttttttgtggttaaattatttagccatcattttgtttaagcgtgacttgtcacggccagctttgttggcatggattaagccttttgttgaggccatatcgattgcgcgtgtagcagctttcaataggtctgcagcttcttcgttgcctgctgttttagcagctttgaactttttgattgctgaacgcattgtgcttaattgagaagcgttacgttggttagctttttcaattgttttcacacgtttcatagcagatttaatttgtggcatgttgttcacctccgatgggtttcactatctttataaaaaagatttttaatttcaacagtcgttattataccaaaatagtgagagtgattgcaataaaaacttgtaaagtatttcaacttgactgcttaaatagtttgaaactgtgccttgcttttgacgctaatatttagtaaacttgaaaagtgcttattgcacaggcctactactctgtttagcgacgttcacccgacgctttacgttgttctaggctattataccagaagggtggaaattagcatggctatttcacaagaaaaaaagaacgaaatcattaaccaatttgctcgtcacgaaggcgacacaggttcagcagaagtacaaatcgctgtattgactgcagaaatcaactcattaaacgaacatttatctgttcacaagaaagatcaccattcatatgttggtcaaatgaagaagatcggtcaccgtcgtaacttattacgttacctacgtgaaagcgatgttcaacgttaccgtgaattaatcaagagccttggcttacgtcgttaattcattttcaaaaagcgggtccgttatgcggacccgctttttttgtgctcaaaaggcttttagtaatcaaaagctgttagtttgtttaaattgtgataaaatatgagttagactttaaggcggatgagttttaaacgaatgaacgactaaaacaaacaaaatagtttggggaataaattcctcaagtgctagaggtgaaagaatgagtaacattaagattatgccacttggcggtgttcgtgaaaacggtaagaatttgaacattgttgaagtggacgacgaaatttatgtattagattgtgggttgaaatatccagaaactgaattattggggatcgatatcgttattcctgatatgacctatttagaagaaaatgcagaccgtgttgctgggattttcctaacacatggtcatgctgatgcgattggagcgcttccttatttcttaaaggaacatgatgtaccagtctttgggtctgaattaacgattgctttagctaaaattacggttagcagcgaaccaaaattacgtaagttccaaaacttccacgtcatcgatgcgaatacagcaatcgattttgaacgcgcaaccgtttcattcttcaagacaacgcatacaattccaggttcattagggattgtcgttaagacggatgaaggacaagtcgtttatactggggactttaagtttgatcaatcagcaatgccaatgtatcaaacggattatgcacgcttagctgaaattggcaaacaaggtgttttagcactcttgagtgattctgctaatgcggaatcaccatttgcaacggctaacgaacgcgatattgctgaatccatcttagaaacgttcaagtatcaaacgggtcggatcattgtggcttcagtggcttcaaatattatgcggattcaacaagtcattgatgcggcttataaaacaggccgtaaagtggttttaacgggtcgtgatttagaaaaaatcgtccggacagcaatgaaattatcgatgattattttgccagatgacgatatcttggtccaacctaaagatttaagcacacttgcaccagaacaaacagtgatcttagaaacaggtcggatgggcgaaccaatcaaggcgcttcaaaagatggcaactagtcatcatcgtttaattcacatcgaagaaggcgacttggtttatttaacgacatctccttcacacgcgatggaaacgattttagcgaagaccaaagatatgatttatcgtgcgggtggcgaagttaaggcggttggcgatgatttacatgcttcaggccatgccaataagaatgacttgcaattaatgttgaatttaatgcaaccaaaattcttaatgcctgttcaaggcgaataccggcaactagcagcacacgctgatattgctcatgaaacaggaatggattacaaagatattttcatcgttggtaaaggcgatattgtcgcttacgaaaaagggaagatgcatgttggcggacaagttgacgcaactgacgtcatgattgacggtagcggtgtcggcgatatcgggaatatcgttttacgcgatcggaaattattatcagaagacgggatttttatcgctgttgttacgattgaccgcaagaataagaagattatcgcggaaccgaaagtcaccgcacgtggttttgtttacgtgaagactagcaaagatttaatggctgagagtgccgaaattatcaaaaatgcggtgcaaaataatctggacaacaaagaatttgactggagtcatttgaaacaagatgtccgggaaaacttaagtcattacttgtatgaacaaacgaaacgtcggccagtgattctaccagtgattatggaaattaatcaaaatcatcgtcgtcaaagaaaagataataaaccaaaggctgaaaaagccgctgaataacatttagaaacaatagcgtctggatcaggtcagttgattctaggcgctattgttttattaattgtcaaaaggaagtgattgaatgggtgacattacgcaatttccagatcagtatgatcggctgatacggatggggaaagtagcgttaaatcaacaaaattggcagcaagcatgcgaccattttgaagctgcgtatcaactagaacagacgttgtcggcgaatttattgtgggccagtgcgctgattgaagctggtgatccgcaaacagcattgacaatcgtcgaagaacaacaagcggactacttacaacaaacagatttagtgcggttttatcttgcattattactgaataaccaccgttttattacggcaaatcaagtgtgggaggcattacgccatgcgacgattgccccgcaagtcattaagacgcttagaatgatgattacggctgcggaattagaataccaagcgaatcaccaagcagcgattcaaaagcaagcagagggcctctataacctcactgcgcacccattagctgaacagctagcaatgttgacgcaggctgaacaattaccacgtaatgtttatgtcaccagtattgcgcccattttaacgaatccttacagtcatgctttcgtgaagacgactgtcattgaaacgctcgtccagctgaatattgaacaattagtcacgatgcaatggtttgaacagacaaaaacttttgtacctgccgatatccaattgatggaggagagcccgacgtttaatgcggtgttagcggcgttaaatgagcagttagccactgaagatccgactttgttagcacaagtgatggcggatgttgagatgggatttgcatatttatatccttttgaagctgaaatcatgtataatcctacggagtgggcgcaagcatggctcaaacagttactgggtccggattataccgcgtcagtggttatttcagaaaagatacaggactgggtgaaaaagttgcaagaaatgacagggaaacttgatttttagagtagaaaacacctaaatatcgtttcaaaactgactttttttgagcattaagtgtttacaaacgcgctcatagcagatataatcatttttgaattcttcaagtgtaaaaaaacactttgattttagcgcttgaagtattataatattatgtaaaggattatcagtttagtaaatctaaacactgattttttcttgcgaaaatacaggaggttcgttttaatggcagaaaaagcacattacgaaagaacaaaaccccacgttaacatcggtactatcggacatgttgatcatgggaaaacaactttaacagcagcaatcacaaagatgttggcagacaaaggcttggctgaagctcaagactatgcaaacatcgatgctgctccagaagaaagagaacgtggtatcactatcaatacagcccacgttgaatacgaaacagaaaaccgtcattatgcacatattgacgccccaggacatgctgattacgttaagaacatgatcactggtgctgctcaaatggacggtgctatcttagttgttgccgcaactgatggccctatgccacaaacacgtgaacatatcttacttgctcaccaagttggtgttgactacatcatcgtcttcttaaacaagactgatttagttgatgatgacgaattaacggacttagttgaaatggaagttcgtgaattattatcagaatacgatttccctggtgacgatattccagttatccgcggttcagcacttggtgcattgaacggcaatgctgacgacgttaaagctgttgaagaattaatggctactgttgacgaatatatcccaactccagaacgtgacacagacaaaccattcttgatgcctgttgaagacgtatttacgattactggtcgtggtactgttgcttcaggtcgtatcgatcgtggccaagttactgtcggtgacgaagttgaaatcgttggtttgaaagacgaagttgctaagacaactgttactggtttggaaatgttccgtaagacattggatcaaggtcaagccggcgataacgttggtgctttattacgtggtatcgaccgcgatagcattgaacgtggccaagttttagctaaaccaggttcaatccaaactcacaagaacttcaagggtgaagtttatatcttgagcaaggatgaaggtggtcgtcatacaccattcttctcaaactatcgtcctcaattcttcttccatacaactgatgttacaggtgttatcgaattaccagaaggtgtagaaatggttatgcctggtgataacgtaacatttactgttgaattaatctcaccagttgctattgaaaaaggtcttaagttcactgttcgtgaaggtggccgtactgttggtgccggtgtcgttagtgaaattatcgactaatattcaacctagttgaatcgaaaaactcgtagtgtaaaaactgcgagtttttttgtgcattaaattcgataaaagttggcctgaaacgactaaaatatcggattttatcgctttttagaccaataaatatttacaatttaggttaaatagtttatgctgattaagtatgcaattgatagattgtgaatataactgtcggagggaaattatgtcagcaaaatgggaaaaaaagggcaccaatgatggtgaactaacctttgaaattgatttaaataaaattagtgaaggtttggacgttgcgttcaaacgtgtacgtaaaaatatcaacacaccaggtttccgtaaaggtaaaatgcctcgccaaatctttaacaagatgtatggtgaagaagccctttatgaagatgctttaaatgcaatcttaccagaagcttatgatgctgctgttaaagaagctgctattcaaccagttgatcaaccacaaattaatgttgaaaaaatggaaaaaggcgaaccttgggtgattactgctcaagtcaccgttaaaccagaagtaactttaggcgactataaaggcttagaagtaccaaaacaaagccgtcgcattacaatcaaagacgttgatcaagaaattgaaaaccgtcgcgaacgtcaagctgaattggtattaaaagaagacgcagctgctgaaaagggcgatactgttgtcatcgattatgctggttctgtagatggcgtaccttttgatggtggtcaagcagacaactattcattagaacttggctcaaattcattcattccaggtttcgaagatcaattagtcggtcacaaagcagacgacaacgttgatgttaaagtaaccttccctgaagattaccaagcagaagaattagctggtaaagaagccatcttcaaggtaacaatccatgaagtgaaagctaaggaattacctgaattagatgacgaatttgctaaagatatcgacgaaagtgttgatacattagacgaattaaaagaaaaaattcgtgaagaattaaaacaacaaaaaaatgatgctgcagatgctgctatccaagatacagccgttgctaaagcaactgaaaatgcaacaatcgctgaattacctcaagcaatgattgacgaagaaatcaacagtcaattacaacaatacttaggtaacatgcaacaacaaggtatcaacccggaaatgtactatcaaatcactggtacaactgaagatgatttgaagaaacaattcgctggtgatgctgacaaacgcgttaagacaagtcttgtacttgaagccgttgtggaagctgaaaacatcgaagcaacagacgaagaagttgctgcagaacttaagagtttagctgaacaatacaatatggaagaagctgctgttcgtagcgtcttatcagatgacatgttaaaacatgatatcggtgttaagaaagcaatcgaaatcattgctgattcagctgtagaagtgaaagacgctaaataaggtcgtctgatcaatccaagctttaaatgatgctaaaaagcgggttcaaggtgtttactttggacccgcttttgtgtcattgacggtgtgcgagtaactttactttattctagaccatagttatgctatagtctgaattacgttgtaggggtgtattttaacgactcacagcggtaagcgtatatcgagaaaggggagaatcccagtatgctagatgatacagaaacaactaacggacccgtaacgtgttcgttttgtgggaagtcgcaagatcaagtgaaaaagatcgtggctggccctggtgtttatatctgtaacgaatgtatcgacctttgcaaagagattattgatgaagagtttaaagatgaggccttcagtgatttactagaagtgccaaagccaaaagaaattttagccattttaaatgattatgtgattggtcaaacagaagcgaaaaaagctttatctgtcgcagtctacaaccattacaagcgggtcaaccaaatgtcagtggccgaagaaggcgatactgaattacaaaagagtaatattgcgttaattggaccaactggttccgggaagacattccttgcgcaaaccttagcgcggattttaaatgtgccatttgcgattgcagatgccacgactttaactgaagcgggttacgtgggtgaagatgttgaaaatatcctcttgaagctgttgcaaaatgcagacttcgatgttgatcgtgctgaacgcgggatcatttacatcgatgaaatcgacaagattgccaaaaagagtgaaaacgtctcgatcacgcgtgatgtttctggtgaaggggtccaacaagccctcttgaagattcttgaaggaacgattgctagtgtgccacctcaaggcggtcgcaagcatccacaacaagagttaatccaaattgatacgaccaatattttattcatcattggtggcgcctttgacggcatcgaaacgattgttaaaaaccgcttaggtgaaaagacaattggttttggaagcaagaatggtcaaactaccaatgaagatcaaagcttaatgcaacaaattgtaacggaagatttaatgaaatttgggattattcctgaattcattggtcggattccgattaccgctgcattggaaaaactgactgaagatgatttggtgcatattttaactgaacctaagaacgcgctcgttaagcaatacagcaagttgatggccttggataatgttgaattagaatttacaccagaagcactccatgcgattgcacatctagcgattgaacgaaacacgggggcccgtggtttacgttcgatcattgaagaagtcatgatggatatgatgtttgatattccaagtcgtgaagacgtggctaaagttgttgtaacgaaagaagcggtggatggcacagccaacccacaactctttttagctgacggacaagaagcgtcataaaaattaaaagactgccgggacaaattagattttgtcgcggcagtttttttgcattaagggacttttgaaacggtacaatgacgcgatttaacggggttaagaagatatgttaaccatgaaactagagagatgtcaacggcgcaataattatttatttatgctaaactaacattcgaaggaaataatcggaggttattatggaagtacatgatgttgaaatggtgatgagtgcggtagctgcttcgcagtacccaactgatcaattacctgaaattgcgttatctggtcgctcgaatgtcggtaagtcttcattgattaataaattaatcaatcgtaagagttatgcccggacatctagcaagccaggtaagacacagactttaaacttttaccgcgttgaaaacgaactttactttgtcgatgtccctggttatgggtatgccaaagtttcaaagaagcaacgtgagaagtttgggcaaattatcgaggcttatttaaccagccgctcaaatctaaaggggcttatttcattaattgacggccgtcacgaaccaaccgatgatgatatcgcgatgtacgtttttgcgaagtattatgatatccctgttttagtggttgctactaagatggataagatctcaacgggaaaatggaatcgtcaagaaaaaatcatcaaagaagcgcttgattttaatccagtcgatcaatttgtctgctttagcgcactgactggtgctggtaaagagacagtttgggaatggattgaaaagcaatgtgcaatagggggacaagcataatggaatttaatgactatcaaaagttagccaaccgaacgttatatggtaacgaacaagtgttaactaacttagctttgggcttagcaagtgaaagtggtgaagtggttgatatcgttaaaaaatatgcgttccaaggccacgaactagatgaaaaaataatgtctaagaaaatcggcgatgtgctttggtatttatcacaaattgcggaatggaataacctcgactttgataaagtcgcgcgcgaaaacattgaacaattaaaacaacgctacccagaaagacacgcagaataaagcgtacaatcgcgttaaccgaaaggcgattgcaaatgacgcacgtttaaaccagcaaaaaggcggtaagacaaaaatgaatttgtcttaccgccttttttgctgtctttgtttaatgcttttctttttgttctgcatctaccttttttaatttatcagctgtttcttcaacttgtgcttcaactttttggcgttcttctggtagtgatgcgaatttatcgaataaaccggttaaatcggtcttgttagtgacttttaagcccatcgtaatccctcttttctaatttgcatctatcataccagataataacggtttcgccaatgattcactttttataaataaatattgcataattatttaattggttgtatgatagtactaatcagaggaggagataatatgacgattaaaaaattactcacttttgttgggttaccattcatggtaatgttaacgtttttcatgattcagcagcagcccgttttggcagctggacagacggttagccaagtgcaagctaaaaaaacgttgtttttgggaaccagccccgattatgcaccttatgaatttttagtgaataaaaacggtaagaacaagattgtcggtatggatattcaagtcgcacagaagctagctgatgatttaggcgttaagttagtggtgaagtcgatggactttgatgcgttattggttggtttggaaaccggtaaagtcgatatggttatttcggcgatgtcaccaacggatgaacgaagcaagagtgttgatttttctgatgtttattatctcggtggtcaatcaatcttagtcaataaagctgatgcgaagatttaccactccaaaaatagttttaacgggaaaaaagtgggggtccaaacggggagtctccaacaaacactcgctaaaaagcaaattaaagatgcgcagattacgggcttggccaaagtcccagatctcgtccttgcattaaagagtcataaaatcgacgggattgtggcggaagaaccagtcgcaaccgcctatgcaagtaatgatccagaactcgttcaaattaatgggaaatttgatttaggcgcagacatgcaaggatcagcgattgcctttccaaaggattcgccaaccttagtcgctgctgctaataagagtatcgggcaaattaaaaagcaaaaattaattccgcaatacttaaagaacgcgggccaactcatgaaggtcaatacgcacaacactagcatgtggcactattggtcatacttcgctaaagggattggctacacattattcattacgattgtttcaattgcaattgggattttaattggggtcctcctagcctttgggcgtttggccaagaataagttggtgcgtgcgctggcagtcatgtatatcgaatttgttcggggcacaccgttgatgattcaaatcatgtttgtctacttcgggattggcttatgggtcaacattccagcacttttggcaggggtaattgccgtttccttaaatagtgcggcgtatgttgctgaaattatccgttcagggatcaatgcgatcgatgctgggcaaactgaagcttcaagaagtttaggcttgtcacaacgcgatacaatgcgttacattgttttaccacaagccctgaagaatatctggcctgctttagggaacgaattcatttctttaatcaaggaaagttcaatcgtttccattatcggggtcactgatttaatttatcaactcaaagtggttcaatcagcaacttataaaggcgttgcaccgatttttgttgcgatggtgatctactttatcatgacctttagtctctcgaaacttttgaactatgtggaaaggaagatgcaacatgcttaagattaatcaattggttaaaaaatatggggacaacctcgtgttaaatggtgttagtggtgaagtccaagctggtcaagtgattgttgtcatcggcccttccggtgggggtaagagtacgttattgcggtgcttgaaccgtttagaggacccaacgagtggccaaattctgtttgaaggcaccgatttgatgacgttatctgaaaaacagcttgatcagattcggacaaagatggggatggttttccaaaactttaaccttttccccaatttaactgtcctcgataacttaacgttggcgccacaaaaagtgaagaaagaatcagcggccgaaacaacggctaaagcaaaagcgttgcttgaacgcgttggtttagcggataaggcggatgcttatagtgatcaactctctggtgggcagaaacaacggattgcaattgcgcgggcattagcgatgtcacccgacgtattgttatttgatgaaccgacatctgcgctcgatccagaaatggtcggcgaagtcctcaaggtcatgcaagacttagcacaagaagggatgacaatggttgttgtcacccacgaaatggggtttgcgcgcgaagtggcggatgaagtctggttcatggcagatagtcaaattgtcgaaaaaggggaccccgaagccatttttgaccatccgcaagaagaacggacgcaacaatttttagccaaggtcctagcacaatagttgcaatttagccaaaaacacgtaaaatagaaagacgaacacttgttttgaattaaaggagtggtgtttttggcaagcgaacacattgaacataaattagcactcttacctgcattacctggttgttatatcatgaaggatatcaatgccaagattatctatgtgggtaaagcaaaaaatcttaaaaaccgcgtgcgctcgtatttcaagagtagtcacgaaggaaaaacggccaaattggtctctgaaattgtcgattttgaaacaatcatcacatcgacaaataaagaggcctttttgttggaaattacgttaatccagaaacaccaaccttactttaatattaaacttaagcggggcacaggctacccctacattaaaattacgaatgaacgcgatccgcgcctactgatcacgggggatgtcaaaaaagatggcggcttttattttggcccttatccggacgtgtatgccgcccaagaaacattgcgattcttacaacgggtttatcctttacgacgctgtcagggacatcaagggcggccctgtttgtattatcatatgggtcaatgtttgggcgcgtgtttcaaagaagtgcctgagagtgtctatgcggcccaaatcaaggagattaaacgtttcttgaatgggcaagttgatccggttaaaaaagaactgacggccaagatgactacggctgctgaagagatgcagtttgaacgcgccgcagaattgcgcgatcagctccactacattgaagccaccgttgaaaagcagaaaattatttctaacgataataccccgcgcgatttatttgccttttatttggataagggctggttatcgattcaaatcttcttcatccgccaagcacggttgattcggcgtgaaaagcggctcttcccgtgtgtcagcacacctgaagaagaattggcaacctttattttacaatggtacaaccgcaagaataatgtgttaccccgcgaaattctggttccagaaggggtcgaaaagaaagtcctgaccgaaattttgaatgtgccgattcgcacgccgcaacgtggtgagaaaaaagcgttgatggaaatggcacagaaaaatagtcggcttgtgttggaagagaagttccgtttattggaactcgacaaccgcaagaccgttggggcgcaagatgagattatggacgcgcttggcttaccacatggacacgtgattgaagcgtttgaccattcacatattcaagggactgatcctgtctcagtgatggtcacgtttgttgatggtcgtgccgagaagaaactctatcgcaagtataagttaacgcaaacgacagatcgtgcaggcgccaacgaagatgccaatacgcgggaagtcattttccggcggtattcgcgattgctcaaagaggataaaccactgcctgatttgattttaatggatggtggaattgtggagctcaatgcggctaaagacgtcttagagaacgaattagggctatcaattcccgttgcagggatggtcaaggataatcatcacaaaaccgcctcgttgttatatggggaagttgatcaaaccattcagttggatccaaagagccaaggcttctacttgttaacgcgaattcaagacgaagtgcatcgctttgccatcagtttccaccgccaattacgcgggaagaattcgttgagttctaaactcgatgacatcaagggggttggtcctaagacgcggacgaaactcttgaagaattttggttcgatgaaacatatcaaagaagcttcagtggcggaactcgaagcactcgggattcctaagactgtggcgcaaacgattaaattatcactttaaaagcctaggtcagacaactattatttgtctgacctaggtttttttagggtgctaatggttggttaacggttttttttacccacttagtagccaataattagtaattaatcctaccataaattgtgcaaatagtaactattgcgttgtttaaaatcaaagattgctttttacgtcagaaatgctagaatatttaagtgacgtttggttgtaaaacaccatatgttgtatatcaataataatttaaacacattttatggtcaaaagagggagactgatgacattgctcgtacttgctggcacaattggtgcaggaaaaactagtttaactaaatatctatctgatcacttaggcactgaagccttttacgaatcagtagacgataatgaagtattaccattattctacaaagatccaactaaatatgcattcttactacaaatctatttcttaaacaaacgatttgatagtatcaaacaagcatatacagatgataacaacatcttagaccgttcaattttcgaagattcattactcttccacttgaacgctgatcttggtcgcgctaccgcaaccgaagtccgtgtctacgacgaattattagctaacatgatgcaagaattgccatttgctgcccacaagaaacgccctgacttattaatccatgtacgcgttagtttcgaaacaatgctttcacggattcaaaaacgtggtcgttcatacgaacaactagaagccgatccaaccctctacgactattataaagaattaaacagccgttatgatgcttggtatgaagcctatgacgaaagtcccaagatgcaaatcgatggtgacaaattagacttcgttgaaaacgaagctgatcgtcaaaaagtcatcgaaatgattgacgaacgggtgaaagccttaaacgcagaacaagaagcaaatatgggtgcctaattgcacaaaaaaagccgttcgacaaattgtcgaacggcttttttattatgcttgggtacctttttgcatccataattcatgaataatgccatacagccgggcatagtgatcgctactagcatttaagcgccacgtaaaatacaacgcctccggattaacgttttcgggtaaggcaatgctcgacgtccgaacaatcaggtctgcatcccgtaaagcttcatcggtcgtactaacagcgacatatttgatattatcgagtgctgttaagatatccatatagccaatgtaatcttgctcaatcacgagtgcgaccttcacctggcttacaggatgatactgctggatgacttgttgaattaaattatagtaagcctttatcaaattctcccgcccacttgctaaaaaactaaaagctggttcgaataagaggtaatctacggtatcactaatttttttatggagtagttcattgggttttagctgcggcatacgaatgactaattcattaaaaacgacagaggtcgcgtccatcccaaggatataggtcgtcaccgtagtcgttaacaacgcatttttgaaaatatcatatgtgtgctgcgaaatctctaactcatgcataatatcaaatggaatacgctccaaaaaggcagtcacaaaacgatgaatttctggtatataacgttcatctgcccaatcagcagtcaccttagtacttgttattgagcgtaacggtactggacaataccgtaacaagaagaatagtccagcggcttctgaacgcccttccgttaacgttaactctgccaaacaagttcgtaatcccgttgattctttagtgaaatcggctgcaagtaaatcactgattaaattaggatagggataccgaatagttgctaatttttcatcgggctgcacgactgcaccggccatcactcgataataagttactgccagaatcgtggcgccaatttcgtgcgttaataggttaggcttttgcaattgaaattcatcacagacatagtcaaaggccgacaaaacacattcgtgattgatttcttcaaatagccattgatgcccaccagacgccaaccagtataaggcggataagaccaatcgaattgtcttctcatcaccttccaaccggattggttcgtatgaaacccgtaagttgaaggcgcgggttagatcgcggacttgcttcaaatgacgtaatacagttgctttactactatcatgctctgctaagaaggttttaaacgatatatccccgccccgcaatagaatctgtacgaaatcatagatgtcagaatgttgtactaaatataaatgatagacatcacttggaattgcgaagagtcgcttaacatcatcttcctccgtccctaatattgcctgcagatccccaacaatactgacatacgtattgtataagctactataattacggtctaacaatgttgccacttgcttcaaattgacgtcatcgattagtgcttcgccctttttagccatgctcattcgttttctaatgggtaattcatcccatttgacattaataatatctaagaaaagagcatacttatctttttctgccgatgttaaataaacactatcggtatccacattgcttaaccccttgttccaaataattgatatatattttaccatcaatcgatattaaagcataaccattctacagcgagatttgttgcgtataacaaaaggcgatgcgttattaacacacaccgcctcaaaagctgaaaataatttcatcatcagctctaattaaacctgacacgctaataacttaaatcaccaattgccatttcaaatcagcattatatgagccaatctgataagcatcattataaggtagtgataactgtaactgactttgtttccaaccaactgtggttccataactcgttaaatcttgctcactgattggccgctgtagaatcccatcaatccattgattatcgggtgactcattagttaatgcttttgcatcactatcatttaagcggtatttaaaattttcttgcatataaaagggattattgggtcgttgatttatccccagatagcctagttgtaaatcaaaatgactacacaacggattacatatgactactttcggcgcttttggtgtaccagtatctgccacttttagttgtacacttggtacctcatttagcgcaatcgtccgattagtaccccccctacttcgacccaaaatttcgtcatcaaacgtaattgttttcgggatgccaacctctactgccccgtttaaagttaatttgaattggaatttagcgattggatttaaatcatcatttgcaataggtgcacttgccgccttttcagacaacgtaaactcaatgtcgcttgtccgcatgacatcacaatgcagcccttgctccgtagtagtcggattccctgtctgattctgactagcattaattagctgtgccataaagctctccgataaatgcaactgcgaatcggttatcaccggttgccacactacattttgatctgcattaacacgatagtataacccaaaagaatcaggcgggttaactaggtcgacttgtcctgtaatcccgtactgcggggccgcatgcagtgtgccatccgcataattaaactgcgcatggccattcgattttacagactgtgcatttttggcacccggatcagctaatgtgacagagcgaatctcaggcacctgaatgcctggaaaatcgtggccctgaccaaaaacggctttatcatgattgggtgaaatcggagcatcgggtatgtagattagttcacgaataatactttcaagtcgcgattaaattcagtatactaaatttagataaacaaacttactggaggatagtattcatgcggacttggcaaaaatggactttgattgttctggcacccttcttaataccaattatgtattttgagaaccaatattttatgagagagcagtttaaacagtcgcaaaagaatatgcagcagtcaactttaagtgattttaatgaccaagcaagcggtcaatacgcggcctttaaaatctacgctgtagccaaaccgcatggaaaaatctattattttgtcccacaaaaccaaaatggggccaatatcgatttacaaaaacaagaagtcgcactcggtaatcagctttatgcaaaagcacacaaagaatcacccgacattgaccatatcacgttgtacgtcagttatactgctaagaacttgcaagacaatacgtatgcttttaagccaaccgccgaggcttatggttttgtaaaatcacggtttaagacccgttatcaacgcttattttcacaaactggaactgaagccatctatgatatgcagcacaatacaacatcggtttcgtttaaagatttacaaaaagatagcacaacaattccgatgattcgtcaacttgcaattaaccaacaattacaagcccatgattatacccccgaacaacttacacaattggaagcacttgatttcccgggaaatgatcaagcaaccaattttgactttacaacagatggtctaacattgaaattcgcaaagaatcctcttgatattgaaacaattgccctgccaatggcaacggttggtccatacctcaatcccaatcttgtcccagaagacaatcaaatgccttccaaaaaaggtggtgctaaaaagattgcactcacctttaatacgacattaaaacctagcactattacgagtgtcattaatcaactaaacgatttaaacatcaaagcaacttttttcactactggtaaagcagctaaagaacatccggatcaactgaagcaattactcaaagctggccatgtcgttggcacccaagcgtataacaacgatgatgacttggatacaatgagcgcgtcagaaattgccgataacctcaagcaaaccgatgccgcctacttcaaagccagtggtcaattgccacacttattacgggtcacaaccgaaacccctagtacggaattaacaaccgctgctagccgggcactaatcgcttggagtgttgattcggaagattggcgcttagatattgatgcgccgacaattgtcaaaaatgtaaatgagcgtattacaggtggtgatcttgtcctactgcacacaagtgaggcaacgattaaggcattacccgcaattgctaaagaacaaaccgctcaaaaacgacatttcgtgacagtcaacgagctcttcaagcaacgattaacaccttatcaacaatatttcaaagctggtgatcaacgctcgctacaataacgcaaaaaggcccgacaacttaaattgtcgggcctttttgtaatctaaacgtgctccgtaagccgcacgctatttatgttttgataaatcaacttcttctagtggaatcatcttagttttgtaccgtactttatagtaaacatatagtacgacaaacaatggaatgctcatataactaatcccaatcgctgtccaatcgaagttcttaaaggcttgaatatcttgccctgcaatcaccaataaacaaagcacgaatgcaaaaatgggaccaaatgggaaccaacgtgcatgatatttcaattcgctcaactgatgaccttgtgccttgaacgcacgacggaaacgataatgtgacacagcaattcctaaccaagcaataaacccagtcaacccactagctgccactaagaataaataaatccgagttccaaaaatacttgtcacaaaggttaaagctcctatgattgttgtaccaatcagtgccattactgggacgccacgtttgcttgtcttagcgaaaattttagctgcatagccatcttcagccattgaccacaacatccgggatgaagcgtacatccctgagtttgccgctgataacactgatgttaagatcactgcgttcatgatgctggctgcagaagctaacccagcccgtttgaacactaacgtaaatggactaacagcaatattcgtttcactcgcgcccaacaatgagtggctatcataaggaattaaacaagcaatcacgaagattgaaagaatataaaatagcagaatgcgccagaaaacttgtttaatggcctttggaatactcttttctggggtctttgattcaccagctgtaatcccaattagttcggtgccttggaatgagaagccagcaatgacgaagacactcaacatcattggtaacccaccaacaaatggggccttcttataagtgaagttactcaagccagtatgatggccacccataatcccgagaatcgttagtaacccaacacctaagaaaataatgaccgtaatcactttgattaacgcaaaccaatattccgtttcgccgaatgatttaacactcgtgatgttaatcaagaaaattaataatagtgcgactaagctaaaaatccaccctggcatatcaggaagccagaattccgtaacgagtgccgcggtactaatatcaaccgccaacgtaatcgcccagttaaaccaataattccaccctaacgcaaaaccaagggctggatcaacaaaccgcgttgcataggttgagaaagaacctgagacaggcaagtacgttgccatttcacccaaactggtcatcaagaagaagaccataatcccaatcccacaataggctaacaatgcaccacctggacctgcctttgcaattgctgaaccacttgtcacaaataagcccgtcccgatactaccgcccaacgcaatcatcgaaagatgccgcgtctttaactcccgcttcatttcatttcctgccataatacttcgctcttttctctatgatttcaagaaaaagccccaaccacgttctagcaaacaaaaaaacagtctttttgtctgctaaaaacgacaaaaagactgatagccttataatatccgttgatagcgccccgtaacatttcgttacgacagtccttgatttattcaaccaagtcccaacatcaaaatgaataagcaaattgacatttcggcaaattcccctttaattatccctcattactgcttagtcagttcaggataacgactcatggtttttgcgacctcttatcttgttagaaatgagtatacagaattcacacaaccacgtcaattatttccattaaaaaaccacgattatttcaatcgtggttttcattttgcttattgttctttatctttgcgtgatttccgccataaaagaattatcaatagtaggataatgacaatcataataccgataatgacatataaccaccagttattgttctctggtaattcaacggccttatcgttatattttgcaacttcctgacgggtaatctcgcttagtattggttcctgtataatcaatcaatccattttcattggttgtcgctgtcgtaggggtcacatcgaccgtaattggtttcgttccactattttgaacccgcacaccaacttcttgttttcgaccaggagtaacttttaaatcataatagcccaactccgtatccgtttgattatcaggatagacgggcgtaaccgaataagtcactttctccgcctgaactggttgatgactaaccatcaacatcaggccaaaagtggcaaccaccgctaataacaatccaaatcgttgcttcattcgtctcattctattcgctactccttctaattcagagtacgttttatgtaataaaataataagttttcagcaaatatatatttttaattttggtgttaattattttcttcactattaatcttaatcctttgttaacaagtggtacggcgttaattggatatgccattgtccattttttaaataaattatcaattttctgaaactatcaactaatcaattgaaaactaattttcaattccagcacaaaaaaagcaatccaacaaccggattgctttcactctattttaaatttttaatgatcttctggatgagtaattcacgctgttcggctgattgattccaatcaatcactggaatggcttgatgcccaattgtctcaataatcaagccagaaacagtttgccgttttaactcgttcgcccatagcatgtccgccttgtggaacgcagcgttaataatcaatgttccttgtttagcaacgggttggaagtcattgaagaccgtatccaacttacccgtatctggataagacttaatttgtccttccgtggccaacacaacatcgtagattgaaacttcatcggctggccgcgctagtgtaaaaccaccactattaccagaagccgatttcactagcccagccactactaacttacgaataattttgcgtaggtaagtctgtgacccgcctaagcgatgatgaatgacttcagacgaaattgtgtgttcaggatcttgcgtcgccaaaagtacgataatacaagttgcttgttcaaacgcccgtgttaaatgcattagccctatcccctttttaacagtcgcgcactacgcctttcgcgtcttagtgaatgaaccagaggattgacctgcgtcggtttgtacctcaaacccatatttttcaagaatgtgtgcaactttcttaaaatcatctctatcgaacgtactgatattaccatcaattgtttcaatttccaacttattcgctaaattacagaaggctttcactgccaattgtgctaaaccaagattttggaaatcataaacagctaagcgtgaagctgctcctaatgtttcaagaactgtaatgtgcatttcttttttccatttattggtttcaaataagagttgtgcttgaaaatcaaccgttgaatgtccaaagcggtcgacgttagcgtatggtgtgtagacaaaaatcgaacttgtcgattcttgttgaccattttcgcgatagtctgtatagacgatgtactgcttaaccttttcatcattaacctgattcatacttgatagaatcgtcaaattttcgtttgcctcaatttgcgctaacttccgtgcataggcttggtcgttttcgtttgccatttgattaacccccatttgtctttcaaaccgattataccatagctttctcatttaaaccgtgatttattacggttataaccatgttatttttacaatttgaaaacgttcactattcggcggtagtactgaactcgttgcccgcctaaataatccggtagttgtgattgataagtcttctcgaactgaactttctgtaaactcgcttgcgatgcttggttggttaaaaagcaggccgcattaaaggtgtttacaccagtttcttgcgcataggcttgcatcgttgccggcaatactgcgctgataatcccacgtcgttgatatgccggtaagatggcaaaactgagttcatatgccgcgactgattgtccatccgcactaagggtaggggcgagcattatcaatccttgcaccacctgcgttgtgcgatcaacaatcgcccaagcatcctcatcattcatcaacattgttagaaacgactgtgcttcttgttgagattgaaaagccgtcatatttagctgcgtcacaatctttttttgacaaccaatttgatagaccacttcaagatccattagttgaaaatgccgtagttcagttgtggcagtcctaatctgcatctggaacaactcctttgtcatatcaacactcatagtaacccacttacagtgttgcgccaagtaaattcttatgtttccattaaacaaaagcgccaaagttgtggtataccactttttcagtttatactaataacgattaattactcttgtagaaagcgagcataccgatgacattccgcgattatttccatttattttcgaccgtttctcaacaagccgaatcctatgattattttttacactttattgagacacctgttcctgatttacaacggtatcccgaattaactaaaatttgtgattgggccgcttatgatgatcacagttttcgtctgtggacaagcttgcccctcgacgaattcgagcagcgttttgctgaaactgtcccattaccaagcgattcttaccagttagattacagttacaatttgcaagatacaaattttttctaaagttcatgcttgacttttaattcgaactaccgtaaattgaataacaatcataagtcatcttaattcaaactaagtagtgcattatctgggtgtcagaaagtcggtggttgctgcgaaccgatcagggtaattgttacgaaatactgaatggatgattcggctaattaacaggaccgttatcacctgtaagagtggtgtgttaccttaaaatgacacgctaactgggtggtaccgcggtttccaatcgtccctattcgcatcagcgagtagggactttttttgtagagtgcgttatttagcgcttaatatctgaacatttgcatagaacattgccaatcaaaaacacatttcaactatggagggattttcatgttcaagattgcatcgtgcgggggaatcctccgttatcagtcttttgtcgcaccagcctaaccattaaacttaaaaggatgcgatttaaatgacaaaacacaaaactagtttattagaagcaagtatcgttttacttattctgctagccatcatgggtagcggcgtgattgttttccaactttcaccacaaacacccgtcttaacggcgattgccctcttgattctatgggcccgttggcggcactttagctgggacgccattcattctggtatcgaagatggtctcaaaagcggaatcattcctatcattattttcattctcgtcggcgccttaatcagtatctggattgccgccggtgtgattcctagcctgatggtctggggcttcaaaatggtcagtgtacactggttcattccctcgattttcgtcgtctgtgcgcttgtcggcagtgccatcgggagcgcctttaccgtcatttcaaccgtcggcattgctttcttcgggattggagccacactcggactaaacactaccatcgtggccgcagctattatttccggggcaatattcggtgataagtcatcgccactttcacaatcaacaaacttaaccgcagcggttactgaaacagatctatttgaacatattaagaacttgatgtggaccacggttccagcgtttgttggctcattaattttatacgctatcattggccacacctcgaaaaatgtctccctcgataaaattggtgcgacggttgctgtcttaaacacgcacacttcagttagcctacttgcactaattccaattatcttaattttcgtttgtgctcgccttaaaatgccagcaattccaacactctttttaaacattgccgtttcaatcggtttaatctttttccacaacccacacacaccaattgctaaaattgcgagttacattgaaaatgggtttgttgcccacaccggcgataaaagtatcgatgccttgctctcacgcggtgggattaatagcatgttaagcaccgtcgccttaattatcttgaccttaaccctcggtggcctcttaatgaagcttggtttaatcgaacgcgtgatggcccctcttgctacccatcttaagacgccaggtcaattgctcagcgccgttattgcttctgggattggcgttaacctctttatcggtgaagaattcctttctgtgattctccctggtaaagccttcaagagcacctttgaaaaatcaaacttgagtaatcttgctttagggcgcgcccttgaagatggtgggacagttatcaactacctcgttccatggggcgtcgctggcgtttttgccgctaatactttaggcgtccctaccttgagttaccttccattttgtttcttcagtctcttatcaccaatcttctcaattctcagtgccgttactggcatcgggttaaagagaaaaaccgcctaaacacgcaaaaaaggcccaggataaaatatcctgggcctttttttacattaattgcattaggaattgaccgccatacaccagcgcaaaactatacactgcaattgaagctggcttgcataaaataatgatccatgtaaatttcttcaatgacatctcggtgagcccagccatcaagcataagacatcgtctggtgcgaccggtaagaaaatcgcaagtgcgaagaagcgcacaaagtttttcttttccataattgtcccgatatacttgtcatacgttttttcactgatgacgtgtaagatgaacggcttcccaaattgtcgtgctaataagaagttcaagatagaaccaattgcaatcccgacgtaattataaacaaacccccaaagtgggccgaataccaaaaccccggctgcggtgctaatcccgcctggaatgacaggaatcacaacttgaataatctgaatcgtgatgaaaatcagcggaccaattagcacagagtgccccaaatacgcctgcaacgcggtcgtgttattaaaaagaccaagccgagaccaataaatagccaatgagatgcttccgattaatgccatgagagacgttgcgctgattaagcgtcttgaaattgttctactcatccgctgaattccttccaaggttaattttaattataatttaccacattcaacattattttttatcggtcgctagtctgatttaaaaaagcttaactttctaagaacgtccgaaatggtttcaatccttgtgcatgatatttttcaacaaaggccgctacttctgctggatcctgtgtttgatcatcaatcacgagttgttcaacgggtaacggacgttcgttagcaattttaacatcaatcacaacaggttccttcgtgcctttagcagcagcaaaagcagctttcaattcagctaatgtccgtaccgtaaatccttttgcgcccatcgctgttgctgctgcaccgtaatctgccccttgaatggcaacccctgagtgtggttgacccttatcatcttgttcagcttcaatgaatccgaatgaatcgttgcttaatacaacgttgatgattggcatttggtatttaacttgcgtgataatatcttgcatcaccatcgtgaagccaccgtcaccactaatcgaccagatttgacggtcagggtaggcagcctgggtcccgattgctgcaggcactgcgcaacccattgtggcataccatgctgataacgtcatacgttggcctggatgcattttcaagaaacgcaccccatcgattgaaacattcccaacatcgagattaaagatggcatcgtcagtggccatctcattgatttgtttgaagacgggttccacacgtaacggtgtttgatcgtcttcttcaaaactggctttccattcattccagttttctttattggcgagtgctgctttataaaaggcagattttttggcaactggttcactcgcggctagcaatgcctttaatgccgtcttagcatccgctaaaattccgacatccacatggtgtctgtgtcctagtttagtaggatcgatatcaatttgaataaatttggcatctggcttgaagaagtattgaccgaattcataattgctaccgacaaataagattagatcagcagcttctgccaaatcaactccgggtttcgtggctactcgcccagctgaaaccatataagctggatggtcatcggcaacaatcccttttgaaagggctgatgacatcattgggatactcaaccgatcagataaagcaaccaattcttcacccgcagcacgtgcaccttgaccaaaataaataatgggttgttttgcatctttaattaactgtaatgtacgatcaatatccgcgcttcttggctctggataattgcccatttggaataagtttgcagtggcctcgaagttatcttcaatcggttcccagcctaggttagttggaatcgtgacaactgctacgccgcggtgtttataggcttgttgaatggcttggtcgactacaagtggcatctgttcagccgtcattaccgtccgattatagactgccacatcagcaaacatggggttttcattcatttcttggaaataatccgtattcatcacacccgtagcaacttgtccaactaatgctaatacaggaacattatcatatttagcatcatagagaccatttaacaagtggactgcaccaggtccggctgagccaaatgtagcagcaatcttgccagttgctttggcttcacccgccgctgctagtgcaccgacttcttcatggcgcacttgaatgtaacgcataatcgctttctggttatgtagtgcattcatcgttgaatcaaacgagccaccgggtaaaccaaaaatatggtcaattccccagtctgccatgacttttaacattgcatctgatgcgtttattttctgtgctaccattaataaagacctcctgatgattttatgtttcacttacttaagtataccgcttaaaatgtaagcgttacaaataatcctgaataattcatactttgttgcgtaaaggtaatttgccccttttaacgtttaatttagctcaaatttaatccgcaactatttttgagtgtatttgagctatttttaagacaattttatttttgattggtgtcaaaagagtaaactactcccttgatcgtacttaaattttttaaattgtcttttttaattactagtgagctgaaattcttgaatcctaaacaatgtttgccagtataaatcatcaaaaacattggtactagaaagatgcagccataatttacgtgcatgttgggtgactctgccggccaaatgaaagagcttgaaacgtaaagtggcgctcgttgcgttccctaattcagctgagaaaaccagttttttcatggcttgaactaagttataagccacaccggcgagtaacattctaaactggttagccgtaaaactggaactatccgttttatcaaaggcaaagccacttttaacttctttgatcagatcctccatggctccacgttggtgatagagttcaaagacgtcactggcaaaagccagctccaagttagtcacgataaattcgtgtttaaagagtagctcgccagcagggcgagttgatttaatgatcacggggtaagcgcgaccccaagtgtccggttggtaatctgtcaaacggtgccactggacatctttttcggcgaagtcttccccaggttgccccacatggatcaagtgctcggcgatccgttgtagttttggattagccttgagacggatcgtaaactttgccccagcttcttcacaggcggcataaatttctggcttggcaaaacccgagtcagcccggactagtacatctaaagcagcgtattgtttcagtagcggtttcaaaaaagcttccgcatttttggaagtgtattcgttacctggccgtaatttagctcctaagagacaacccgaaaaaccatcaaaagccaacaggggatgataaccgttcgtttgataatgggtgttaaaagcactgcctttctggtaaccaaatgtatcggaatgagtcgaatcaagatcaatgatcagttgacgttgcttcttttgtgtgatcactaactgcgctaacttggcgactaattttgtgatcccggccaagtcgtctgcggaaatttggttgatatagcgtgaaagagttggttgcgaagcaactaaattatctaaaacaagctcaaagctcatgtctgcggtcagtttattagcggcagtatcgtcgaaataacccgcaatcagctgaatcaacagttgtttaaacagctggttcttatggtacctatagaacttgcggttttccttaaaatggagagtttctttcaaaaggcgcttaaagtggatctgatgcataaattcagccactaaaattagacccgcatcgttagataaatgaccaccattattagaaagaaccagatttttgttgaagttaacggtttgttgttgtaaagtcgacatatggagcactcctgttctgtgttggttttggtcgacttaacaatagcacaggctgtgctctttttgtatacgcaattaaacacctaaaaggtgttggtttggatcacggacaaacaagatgataacaggcaaagaaagaaaaactgttaaagatatgaattattcaggattattattagtaaaaatatgactcctaacaagcaaccgcagccgatgttgaaaaagaagctcaaaacgctccacacaaaaaggacgcataatataaacaggaatgtcagcatcattgccacctctttatttgcaaaccacgctcacttttaccggcttagatcaactttttcattgatcagccacacaacaatgtcgccaattaaaaccacaacaaattcaccaatgccgactgtcaaatatgtcatccaaaacaaaacttcactgaccagatgtaattctagtgcgactgcctatgacattccggccccattgatgactataaattagcaatcaaacacccctcatgtaacgtttgttgaaaaccaccatagtattgagcagttctgacaaacgaaattgaatcggtctataactcaatggtgtaaaagcaaacgttaaaactacataaagtgcagcaatcaaaactgttttagtgatctcagcaactttattattaagacgtgccctttttaagaatctcctagtttttaggtgggatggtcacgaaccaccatgtaacaagtaattattccattaatactgtactttcaagtatagaaaaaagacgaccgtttatcaacctgaaaagcatgttataattttattattagacattttaacaaccgagtaactagtcgctaaaaatcgtggatcaactaactgtctagcctaacaaatatttgacacgacccacgaaatttatacaatgaatggatattactaatgaaaatcgctattttaactgacagcgctgcgatgatcagcagtaaagtcggatcacaaccgaatattagggtcttacagatcccactttcattggatggagaagcttattatcccaatgaattaccagaagttgctggaatagaaacgctaagggaagccacgcttaacactgtaacagaagagcagatccctctaaccacaatttctgcagtaaccgatgaacttcaacaagctggttatactgacgtactttgtatacatattgccagttcgatcagtggcttaggctcaaatctctctactttcgccaaaagctgtcaacagcagcttaagatccatctctttgattctcatactcttggtcctgcagaaggagcgttggttgaacgagcacttactatgattactcacggactaaaaattgctgacattttagcagaactaaccaagtatcgccaaaagcaacatacactggtcataatggaaaatctcaaaaacttgcgtcggatcggttctatttcaaataatgcacatctcttcagtaataatatgctgcattataaaaccttgctacatttttccgaaaatggtgaacttgaagtcttgatgaaaagttcacgcacgaaaaaaattgcaacggcgctattgaataagtttcgcagctctgcagcaaaaccggaactagcaatcgtggcagacaatacaatggtcttggaaaaatatgtttcttgcctgaaagaaattatgccgcaacttcaactagtaactgatctatattcaccttcgatattttccttcatcggtccacaagcactgatcattagttggcaaaataattaactacatgcaaaaagatcgtccttcaatttaaagaagaacgatcttttttgtttgcagttctcttatattaactttttgctatttaataacggactcgcaattggccagcttctcagctttctgcttagttatctaaatcaaattgacccgtcagtttttgcaactgagcagcagtttcttccaaggtcgaaacatgttgggtaaactcatccatcgtagcttgcacttcttcagagttagccgaaacttcctctattcctgctgcgttttcttgtgttgaagctgagatgctttcaagtttatctaagatcatcttttgagtttcactgatctcttttgtaccctcatggatcttttgaacatttgcacccatagcttcattatgcttataaacgttcattgtcgacttgatggcttctgtgatcaaaccagtctgtttttcactgctttccagtgagtctgttgttgtcttgaccaaaccagttgattgctgtctgatctgttcaatgatcgactcaatttctttagtcgaatcattactttgttcagctaacttccggatctccgctgcaacaactgagaatccttttcctgcttcgcctgcactagccgcttcgatcgatgcattcaaagcaagcaagttcgtctgtcttgcaatatcattgataacgttaatgatcttagtaatgttttgtacatcactatccatttcctgaacactactcatcaaagcttgcattccgttgatctcatttgaccagttaccattgaccttgtccatgacatccaggttattttgtccaacttttgaagcttctttggatgaattagcaagctcttccatattcgcattgacattatcaatatgtgcagtgattttttgaacgttatccacgctttcagtagtttcttttgcttgtgatcctgtcacttcagcaatttcagtgatcgtctgtgcgatttcttcagaagcagttgttgtttgtttcgaaaggtcaagtaatgatgcagctttttcagaaacattcttggcttcttgctgtgtttgtccgatcagaacagtgacagaagcgatcatattattgtaactagccgctaatctgttaaactcatgtccattcacatcagctctggtcatcttttgagctagacgttctattggtaccttagaatactcgattttttcacccactgcaggcacgtaactcatcttaccttggccagcatctataaagaacttctcaagtattaataaagcacgtttgagcaaacctgcactatagtaagatattatcacggctaaaatgatgatcgccaacattgagattgtcaaggttatcaacatatgatgtgtgcctgcgctcaaatcactattgttcatttgggcgatggtccaattgtcagttgtgccattgcccttgtcaaaggtaaccttattgatctgcgaacctccaggaactttgatcgtccccttctttttcgctgaagcagccactgctttataaacggctgtcttgttgatcattttacctgctttaaaagtattattgcttttaccagtgttctttttgatcaaaaccctgccggctttagttaaaacggcggcttgaccattgtttccgatttccatcgattcaacagatttttgtactgatgaatatgaaacagtaactgctaaaacatgggctttcccctgcttatctacgattttctgggaaacacttgcactatacgaatgattagccggatcttcataaggaatcgaccaatatgcatgtcctgtgggtgctttttgataccaatcttgatctaaaatattcatatctttaggcatcgcaaaattcgaataagcatatgtaccatcagtgttgacatacatcaagttggtgatcgttccctgggcgtcgccattggcaattttcaaagttctgttagcatcttttaagttgacattattggtcaactctggtcttttttccaaactagcaatttgtccagtaacatcttgccgcatgtcaacttgttgccgttgcaaaacatttacagccgtcacttttaaacggtcatttttctcgatcaattgctgacgtgtattcccgtatgagatcaaattcattataattgccggtaccaatgctatcaataagagtgacgataaaaaatacttctgaatactctttttagcaacttttttcttacttgccattttctttccccatctttccctaactatctaatttgatcccctaaggatctcatgactatcgttcacaaaagcactgaagcaaacaacccctaaataatatgtttgccagtatttgcttttgcttgcgctgaagtcatcaaattaacgagcaattactgctcttttacccctttagccccactaaaacaaaacataactttaacgcagataatctaatatcgaagtttgcatgaccttagtccccatagccaaggtcgaacgatatgcaatcatttgattttgatattccatatacttctctgtaacatcaacatcttgtttattagataaagtttccgctaaagtatttttctcagatttatttcgagctgatgctgaacttaaacgattttcgatcgaaccgatcttagatctatagtcagtaaagttttcagtaaatttatcgatccctgacaaatattcactggataactttctatctggatcccccgatttcaaagtatcgatcaaaccgctaaagaattcggtcagttcagacttgctatctttatcaatgccagacgaaccatcggcatgcatcaaacgtgaaccatcagtagctaaatctaagctgacaccatctgagatctcgcgctgtaaattatccacgttgcctctgtattctaaactgacagctgccccttcagcatctttaataacagcaaatggtggctcttgtgtctttgtccccccaaagatatacctgccatcatagttggtattcaaggcatcaactatccctgagatcgactgtgagatttctttacggttcgcattgtaaacggcaggtgtagctgttccgctattggccgacgactcgatcaaatttctaatgttaagcatcaaggtcgaaacattatctaaagctgagtcttgcgtttgcgaccagagcgtggaatcagaaattgtttggccatacgttttgttttgtgaaattgaaacattcagatctaagatctttgcgactaacaaaggattatcagaagccttattgacctctttcaaactagacagttgattcattgtcttttgaaccttgttagtactgatctgtaaattcttcaagaaatcagaatattccattttactggaaaccctcattgattaaacccccgttctattgatcaaagtatccaacatttctgaaacgacatttaacaatttggcattagcttgaaaaccttgttgaaatctgatcacatctgacatttcttcgttcaaattaacaccagaagctgcttgatctttgtattccaattgattcaacgctgataattgagcagatgccatattgtctgctttttgtttagatatcccattttttgtaacaatactgttgtaagcacctgggatcgttaaaccctctttagaattattgaaggtcaaagtatctttattataatttttcagcaaattcgctgtatcgaccggataaccaagcttactctttaaagctctagccatcgctaaagcacgtccattatctccttcggccggatcatcaccagtaccgactttcattttgcctggatctgcgactaaatcatcgttgatcttaatacttaaagccggatcactgagatcagtgatttcaaaaaagccgctatctggagtttgcccgtcagaataaacgatattttcaatttctacaacgcctttagcaaaatcatttaattcagctcgatggctttccacttcagccaatgattcttgcaaaccgccgatcgaacctgacttaactgctaacttgctatacttacctgaaccgttcgctgtttcaaaaacgacttctccgaccgtgaagtctccatcgatcgtttgctttggttgtgtttcatcaccatttggcaaaatctgagctttgccgtcagagttactgacaacaacatttaacttagtctgtactcctttttcattgtcaaccactgcatggtcaccgatactaagtgaagcacggccatatttgtcaaacgaaactgttaaattactttcagcagacatatcctttaataaactatcgcgctgatctaacaaatcattgggctgttcatcacttaaatgactgtcatacaactgttgattcaaattagcgagttgttccgccttttcattaaaatctagaacagttttcgccaaagaagaacgtgtatcagtagaaacttgtgaaacttgccgtgcagtttgctggatataagaagctaaagcaacacccatttgaacactattagttttagccgtatccaactcgggattgtcggctaacttttgtaagctgtcagcaaaattattcaattgtgtaatgagtccatcgtctgacggctcatgtaatgcattttctaataaagccaaaacatctgacttttggacgttaaaattgtaatctgaattagaatctcgaacctgtgaacgtacaaagtcatcaacgatccgtgagataccatcagcttgaacaccgctaccgatcaaaccgactcctgtttttgcataagggatcttcgttgataaatcaacacgttggcgcgagtaaccttcggtattagtattagcaatattatgactgctagtctgcaagccgatttggttagcatctaacccactgcgagcagtattcaaagtaccaaataaacctgacatgaaagtcctcctaaagaataacaaggtgaagtgaaccgcataaaagttgagcactatcggactttgacaataagtcgtggtttgcgacttgttggcgaagttggataggcacagacttttggttcacgcaacctgactaagaataacaaggtgaagaaatgcggttagaagccgagcattaacggactttaacaataagtcgtgcatttagcgactttttgttgaagttagttaagcacaagcttttgcatttcgtaacctgactaataacaaggtgaagtgaaccgcataaaagttgagcactatcggactttgacaataagtcgtggtttacgacttgttggcgaagttggataggcacagacttttggttcacgcaccccttctacaacctaaaatgactgatctacgattgccgcaggaatatcttctcgcttaggttgactttgagtcctatgctgatcaacataagtattttcctgtttttccaagctgtgttggatcgtatccatcatttttttctgataagccaaggcttgttgcgtcaacaataaattagtttcttgcaactcttggatttcttgaatcagcatctttgttttgtcgccaatttcaccagtatacttctcaaaaatcggtaagaaatcttccttttgcggaacaatttcatttagcgattctccgtcatcaagaactaaaaacttttgttcacgtttcagtattttgataaataatttaagcttagcctgaaatgccttttcattcatctttatttccttcttgtttcatttcctggaacatctgatcagcaatcttttctggtgagaccttatatgttccgtttgccaactgctgtttgattttgtcgaccttagccgcatccacatcatcgtctatatcacgatttttagcgttgtttactaatctttgagcagtatctgataatttaacattaaactgttgtggtgcaccctttttcgttgttttcgaggcttgattgtgatagtagttttggatcatttgtgaattgattgaagaaatatctcgattaattttcatgtgaatgcctcctttttcctttttgactctacaaatacagttatcggccaaaataaaaaaagttaaacctaaaagttcaactttttttaacttaatttattttattgatcctttgtttttgagaaatgatcttattgatccgcacgccaaagttttcattgatcacaacaacttccccagttgcgatcaattttccgttcaacatgatctccaaaggttcgtctgttaatttatcaagttcgataactgaaccagtgttaaagttcaaaatatctcgaacagtctttttagtccgccccaagacaacgcttaggtttaatggaatatctaagatcaaatctaagttatcaccgctgatttcttggtgactcgacaattcttcaaattcgggtttagaaatttccacgttactgacctgcgcctttctttgtggttgttcattgcttggtttttgcgggatcttaacttgttgcggagctggttgtggtttactaatagccttggctttctcgactgctggtttctccgcatcacgtttgacaactgttgctttgtcagacatcattgctttcacaatatctttgaccatttccaaagaaaagatctgcataatttcactctcgatcagtccttctacatccaagttaaatgaaatacaataaatttcttcctcacggtccaaagagtcttcattcacatcgccgggattttcccacaaatgcacttttggaggaagaatatcgactttttggttgatcatagtagccatggatgtcgaagctgaaccaatcatttgattcatcgcttcacccacggcacttaattcgacttcagtaaattcttctgaagctgactttccatcgccacccatcatcagatcagcaataaccgttgcatcactgacctctagcaacattaagttagttcctgctaaaccttcacgaaattcaacggtcgtagcaactttgggtgcatggatctggtcgagtaattcaccaaaatggatttttttaacacgtggtgtcgtaattgccacacgatgagtcagaattgatgacagagttgttgctgcctgtgacatggaaatattaccaacttcaccgatcaggtctttgaccccttggcgatctaacccctccaataattcttcatcatctgattgcgcagcttcttgagcatcactgccattcatcaaagcatctatttgttcttgtgttaaactctccgtcattcttcttccccctcgatcttgctcaataactcaattgcgaattgtccattctttttccctggtttgacccagtaaaacggtcggtcttcaatgtacgtatctaacggactggagattttagagtccagcttgatgacgtcacctggttctaatttcaagaaatcagccaagtccatttgggtgttgcccaaaacgacttccattggcagatctattgcgtttaacccgtgttttaattcgctttggtcatcttcacttaattcctggcttgagtcgaaccaattatgcaaactcaatttatctaggataccttcgaatgaaacataaggaatacacaagttaataaatgttgaaactccgaaaagctgtactgtgaaagtagctaatacaactggttcattaggtgataaggactgtagtaattgtggatttgtttctagagattcaagctcaacatcaagtgtcaggacttctttccaaactgattgcaaaattttagagaattcacccataacctcatctaataatgttaattcgatatctgtaaaaccatttttatccaaaggcggttgattttttcggttactctccaaatcagcaccaccacacaacaattcgactaaagtcatacatagttggggattgatttcgatcatgtgtgatcctttaaggggagctgctttaaacattccgatcaaagtcacacgtgggattgaatgaatgaattcgtcataactgatctgctcgatcgatgctaattgcatatccaagttagtccgcaagatatttgaaagaacattgccgctcatcttagcgaagtcttcaaaaatcatgtgtaaggtatttatatattctttagatagccgtgtcggccttctaaaatcgtatggcttcgcttgtgattcgtcattttgctcttcatcgatcacttcttcgtctaattcgcccgaatcataggcatttaaaagtgaatcgatttcctgctgtgataacacctgatccacaaagacacttcctctcgctcattagttcattccacaattaaaaaatcttatcattaacgtcgatcacatcagcaatcgtttgttcacccaagtctaccacaccggtaaaataaagggcggcttgatcttcacttagttgaatatcatcaggatcaacatccatcacttcgatcacttcatcgatcaataatccacgacgttcatcatcttttttcattatcataatatttcggtttgtttttgattccggcagtcctactaactgtgccaagctgatcaccgtcaacactgtgcctcgcaaatttatcaagcccttgacccaaagcggagcaagcgggactttggtaatttgaaccgtatcaacaacttcttctacagtttcggcagctatcaaataatgttgctgattcattttaaacaaaatcatctgcattaaaacacactccctttcttaattaaattcagtcaatagaactttaattaagacaatgccttatctaaggctttgatcacccgatcagtatcaaaaggtttgacgataaaatcgactgctccagctctgatagcatccatgaccattccttgttggcccatcgcactgcacattacaacttttgcactgctatcaaattccttgatcattttcacggcctggatcccatccacatccggcatggtaatatccattgttaccaagtccggtttctcagactgataaaggtcgaaggcttcttgcccattttgcgcttctccagcgacctcatagccgttcttttctaaaatatcctttaatttcattctcataaaaacagcgtcatcgacgatcaaaactttatttgccacgcgacattctcctctcaaactccaagtgattttatcattttgtcaattacacccaactctgggatgaagtatagtgaagcttccaagtaattagaatcataagtaaattcatttctgatcaccatgatctcatcaccaaactgttcaaattccatatatgcactactaatcacggcaccaaacatatcaaacgaacttaccggaacttctggttttaatttcttttccagcatcccgccgatcgatgttaaaaatgaacttgaaacaatgttagtcaattcactaactgcagaaaccttaatttcttcggtcacaccttgatctgttcccatcatcaaacttgagatctctttagcggccgggtccgtaataacaaatagcatcgcaccctttaagtcaccatggatgctgcttaaaacggcataaacttcctggtcatcggccataacttgctggtaaagctcgtcataacttaagatattgacttctggaacacgcatcctgatcacactgccaaccatttgtgatattgttgtagctgctttgccgccgccaatattcataacttcttttaacgcatctaattgtatgtttgaatatgccatcttaacccacctgtgcgtctttacagatcgtattgacgtccaagatcaatgcgatcgagccgttgccaaggatcgtcgcgccttggaatcttttgattttttgcaacatcggatcaatcttcttgattacgatttcttgctgtccgatcaattcatcaactacgatcccaaagtctttattatcacccttgatcaagatcatatatttctttccctgatccttttcagggatattcaaaatgttggcagtccggatcactggtgtcaatcctgtctgtaaaggatagacttcctgactagcagtttgtaaaatattatcttcatggatcatttcgacccgttcaacaacatctaacgggatagcaaatgtttcttcgcctagtttgaccatcagtgcctgaataatagacaaggtcaacggtaatttgataactgttttcgtacccacattgactttactgtcaacttccaatgaaccgcccagttcgttgattttagcttgaacagcatccaagccgaccccacgtcctgaaatgttagtgatctttttagccgttgaaaagccaggattaaagactaacatttgcagctctttatcactcataccggtcgtatcgattccacgctcttcagcggtaattttaaggacttgtggatcaaggcctttaccatcatcgctcaaagtgatcatgaccttatttccttcttgataagccgataattttatctttccttcttccggtttgccaagtttctttctgttttcagcatcctcgatcccatggtcggctgaatttctaactaaatggatcaagggctcactgagttcggtaaccacagttttatctaattcagtttcttcgccctcaatttcaagagtcatctttttatttaactggttggaaagatcgcgaaccatccgtggaaaacgactaaagacaacgctgacttgctgcatccgaattttcaaaaccaaatcctgcagttcagatgtcaagcgtgaaacctgttctaaagattcatgcacttcttctaaattttggcgactattggcatcttctagttgattgcgataaacgaccaactcagatacaacattcaaaaaggtatccaaccgagaaagatcaactctgatcgactgatttttggcatttttttgatgcgaagtgctcttcttagacggggcttttgctttcttaggttcaggagcagcgctttttttctcagtagtattttctttgtcaacagctggttgtgcgtctttttgtggttcttcagcggctgccttttgagttttctcatcgaattctgccgtcaaaacttcagcgatctcactactagattcaatgatcttcttaatgtcatcttgattactttcagttaggatcaacaatttgaaatctgtatcaaaattgccttcttccagctggtcaggagccggttcagtgtgaataatatctccttcactgtcgagcttatcgatgactaagaatgctcgtgggcctttcagcattgactctggatcgattcgaactgccgcactgatcacattaagatgttgtgttttagcctgttcgatcgctgataagtcagcttcttctaaagtttcaaatttcagttcgagctgactatcttctggagctttcttctcatctacatttttatcagcggtttttgtttggccgccatctaattcattttcaactttatctaattcattccataattctgtgatctgatcttcgctttgttcttcttcatctcgcaagccgtctagaagttcggtcaatttatctaagcaccgaaaaatcagagaaatatgatcacttgttaccttcaacttgcctgatttgaaaagatcaaaaatatcttccattttatgagtcaacttgctcatgacagtatatcccatagttgctgacattccttttagggtatgtgcagctctaaaaatttcattgatcaaatcgatattgtctggttctttttcaagttctagaatattatcatttagttgtgttaaattatcttcgctttcttcgaaaaagatatcgcgataaacactattatcgtcagccatcaatgatccccccattcaaattatttacacctaagcacgaatggtctgtgcttattgttaaagtccgctaatgctcgacttttaaccggctcactccaccttgttttcttagtcaggttgcttgagacagaaagctccgcctatccaacattagttccacatcgcaaaatacgcaatctgaatctagtgtccgatagtgctcactttctcccgtctcactcaccttgtttctcatatataaacgactctattttctttaaccccagcttttctgcgctgttaagtgtttctgttgctcccgtgaacaatattccacctggtaccagcgcctcacttattttttgataaactcgatcgcgtgccatgggtttgaaataaatcgttacattgcgacaaattatcgcatgaaaacctgattcatactggtcagccaataaatcatgtttcttgaacgaaactcgttgtttgacggctggccctatttgatactggtctggtcctaatgacttaaaatatcgtctaacatcagtatcagaaacattttttaactcatttgtcgaatactgacctaaacgtgctttctttaaaatgtcatcatcaatatccgttgctagaacattgcccataagatgatttttttctaagatcatcgctaaggtgtatggttcggcgccggtcgaacaagccgcactccatagtttcaaattattaaattgtggagcaactttttctaacaaacatttttcaaaattactaaatatttcttgattgcggtaaaattcagtcacattaattgtcaaatgctcgataaactccgctcgtttgattggatctttgtccaaaaggtgttcatattcatgcaacgagttgaccccgtttttatccataatatttttgatcctgcgttgcatttgtctttctttataatcatcgagatggatatgatatttctgctccacccacctattaaaatcagtaaaattttcttccaacattttaatttcacccaacgatcgtctgtagtattttcccgatctcatgcaaacttacaacttcatcgacaacttgagcttcaattgcagatcttggcattccaaaaacggtacaagattcctgatcttcagctattacataaccgccttcatccatgattgtttgcaatcctgccgttccatcatgccccattccagtcaggataaaagctgttaaattagcaccataatgagcagccgccgtttcaaacaagtaatcaacggctggccttgtcccatgcatcttcggacgttgatctaacttgagccggtcaccttggatcgtcatgtgataattaccaggacacaagtagatctgatttttgaccagcatattatcactagcctcaacgactgtagcgccgctttcttcatttaaacgctcagaaaacgtgcgggtaaatcccgctggcatatgttgtacgataaaaacaggaatgtttgtatgactcacacctttaataatttctaatagtgcttttggtccacccgttgatgagccgatcacaacggcttggggcctgatgttacgctttttatgtgctccgttgggtttggctttatgattggcagcaactggcggtttactagaacgtccgcaaatatttttgatctttgcatacagttctctgacccactcgtcttgaatttccatcaggttcacaggtttttcgataaaatcggccgcaccatattctagagctttgatggttactgcctgatcactgactgcacttagcattatgaccgggatagaataatcctttttgatctgtctaagggcgctcaagccatccataacaggcatttcaatatccattaaaattaagtcaaaatcattatctgcatcaaggatgtccaaacaatttttaccgtttcgtgcaattcgaaccgttgaaacactgggcattttattcaatatatccgagatcactttgcgcataaatgcagagtcatcaaccatcaaaatcctattcataaggtataagaatcctttcacatctttacttttctctcttaaacaacattctcaagtcatcaatgagcaaattttcgttaattaaaaaacagtacatagtttttaaatgtatctattttcctgtctcacgaccctgatcaaggtcgaaaaatcgtttaaatcgacgaccatggtccttccgctgctgccgcccgtatcttggccaactaacgggatctgcaggcttgccaactgatttaaaacagcgtcaacatttctctgaccaatattagctgtcgtgaggttgtttttaaatccaaacatatttgcaccaccagagatcttagcttgaaatttagctcgtggtgctttttgcttaagttctttgaccatcaggggtaacgccgtattggcatacttagccaagttcaaacctgaagtcccgttcttttcaaacggtttactatcagggagcataatatgactcaatccaccgatttttgaaactggatcataaacgatcgttccaatacaagaacctagccccacggtcattattttattaggcgcgtatgaaattttataatcagagattcctaccctggtttcgttagtgttctgcagcatcatccgtattctcttctttttctgaattttcagtaatggaatctacggatgaaatgatctcctcttcttgtgaagagttgaaaagataatctaagttcaactcgatcactacttcatcgcccatcttcaaaaattgactgatatacgggcgcttcagtgatgatctgtccaaatctttttcataatccgtctcagtcagcgacatgatccctacgatctcctcgacaaagatccccatcgtccgttcgctccaatgtgccaagatcaccttatagtccagcgttgcaggcgataattcgccgtaaagccgcttactaagatcaacgattggcaacatctgttcttgatattcatacacacctaatacatagtctggcaattccggcaacgagataaacttttcagtttcgatcactcgtttaaccatttcaactggcaaagcaaaaacttgcttatgacttttaaaaacaacatattgtcccatttttgtacccctctttaacttctacaactaagaattgacgctgctagttttttaatttgaaactgccgatttgcaaacgtctgatctcatcagcttgttgaagctgttcgacacttttttcgagttcttcgatcaaggaataaaaatcatccaagttagccgatacttcctgtgtacttgcagaagtttcagcgatctgtgaatccatttgctgaatagaattattgactgcatcttttttatctttgatctcatctgcatgtgaactaacatcggttaggccatcgctcaactgcgtgacatcctcggtgatttgttcgctagccttcagtacaccagaaatattcatctgctgttgctgactgcccttgtatgatgcatccagatcaacagtcattttcttagacttagcacggatcgattcgatcagttctctaatattagtggttgatttgccggattgttctgccagatcacggacttcctcagcaacgattgcaaagcctttacctgcctcgcctgcacgagccgcctctattgaagcattcaaagccaacaaattagtctgttctgaaatatcattgatcaactgcacgatattgccaatactttgaatatcttgattcatcgccgtcatttcagaaacaatcttcttttgactttctgtttcttggttccaagaccgtgaaacttggcgcatcatttccatgttttgaatattactttgctttgattcgtcagcatagctattcattttttcaattttctggcgtatctcttcaatttggtcaccaaaaacattcatttgagcaactgtactttgagaagctgttgcttgctgtccagcattagtagcaatagtccccatcgcttgacggacaccatcgatcgaacttttagcgtgcgtcgattttccacttagatcgttgaccattgtttccgactgctcagtttcttccttgatcccagttaataaagctgaaaatgcattggctaaaccaagcaactggtcacgagttttaataaacattgggctttggccgggaactttgccgatctcgtcgatctgactgaaatctccctctaccatcttaccgacctgaacagaaagtttttttaatccgccggcttctcctcctgttactgccgtatttttatgaccaaatagtacatacaagagatgcaaagcgactacaatgaccgcgagtatccaaaaccttctcatctccgctgtctgtgccgaacttaaaacaaaagcccgaaaaacaattaaaacaatgactgtccctaaaactggcaagaaagctacttcggagttagcttttttagccgtcttcttacgtttttccatttgttttccttccccatataaaagatttggtatctgtcataatactcacttaagcaaaacgacactccaatctgttatatcggttaaaattttatttttttaaccgtttaccaaacatagacatcttttggatcagaaaatcttgaatatccaccgtctggatcatctcggatcagttctccattttttagttccaaagttcgatgacgcaaagaattaaccatggtactgtcatgtgttgctaaaatgatcgttgtccccatctgattcaggcgaaagaaaatttgcatgatctctttggccgacttaacgtctaaattagcagtaggttcgtccgcgataataactggcggatcattcaataacgcacgagcgatcgcaattttcttttgttgcccgactgaaagttcctgaggcaaccgctcaataaatagcatcatttcgacactggtcaatacctctgccatccgctcttcccacttttcagtggggatctctagcgctgacatacaggtttccatattttctttgatcgtcaatcgcggtaaaaaaaggtctttttgcgaaacgatccccaattgacggcgtagtttgtatatctgttcatttctcaaatattcaatttcaatattgccgatccgggctataccagaatcaatggagcgttgagcacttaagatctcaagtaaagttgttttcccagccccacttggaccaactacataaacaaattcaccttgttcgatcacgcatgaaatatttttatttgcccaaacattgccatatttttttgttacatttttaagttcgatcaattttttctcctaaatcagtcggtaaagtggttgatggtctccatcatttcatctgtagatgaagcagcgcgggcattcatttggtaagacctctgtgctgttaataattctgtcatttgagtagccagatctacattggaactttcaagagttccttgcatcacactactacctgccccagcggctctaaaaccgccattggctaaatacaagttatcaccaactgacaccaatgaatgtgcgttgtttggttcaaataaacgtaaagaccctaaaacctgatcaccggatctgatcgttccgtctgaagaaactttcaagtcccctgctggccaattttgttctggcacccgcgcgtcaactgcaacccgatagccgttgctggcgatcaaaccaccgttagcatcacgatgaaagtctcctgccttagtcaagtatgtattaccatcgggaccaatgatcccaaaaaaagcattgccgttaatagccatatcaagtgcacgaccggtcgtttcaaattttccgacttgatcatcgactcgtgctcccgcggcatttagaccagtattcgaatcaactcttgcattagaattaccaagtgcaccgtcgctattagttaaattattattcatcagctcattaaatgaattgatgattcccttatagcctactgtgttttcgttagcaatgttatgtgaaacattatccagattattttgcaagccgttcaaacctgttctgttaatggataaaatagaattcaagttcatttttacttactctcctcatttcctacatgatctgttttctcaagcctatactaagtaccatcaagactcactgtacgcctgagaaaaataaccaactatttgatctagatccgacctagttggttgactgccttatccaaggtcgaattagtagctgatagcactttttgttgagcctgaaattggcgcccggtttccattaatgagaccatctcatcagcagtagaaacattagaattttcaagcattccagcttggaccggcaaatcaatttgctgggctccctgcccggtataaagcgttccgccgacattttgaagttgtgcatttgctgggaaagacaccaccatcaaattttgttgtgcttgctgggcatcaactgggccgccatttcgacctatcacttgaaaaccttcttcagtgatcagctgaccggcatcattcactgaaaaatgaccatcacgcgtatacgcgatttgaccatttcccattctaacggcaaaaaagccattgccttgaactgcaaaatccgttgccaagcctgtcggttcaagcgagcctttttgcatgtccagagcactgccctgaatttgattgccccatgtaaaaccgccaatctcatggcgggtttcatttttgggaccagcctggttattatgtaactgtgcctcgttcattgttgcttcaaacaaatttttttgcaggtagccaggtgtcttgatattagcgatgttaccgctaatattttcttgttgagcttgcaaaacattaaaactatgtcttaaagtatcaattcctctaatcatcattttcctccataaatccttttagttttccaactgcacgcccatggatctgtgaaacgcgtgcaatagaaacgtctaagaccaaactaatttctttaagtgtcatttcctgttcgtaatacaaactcaaaactaattgttctctttcagaaagcttgctgatcgccgctgccaactcctgtttcatttctgtttccaacaaatgttcttgtgcatcgcccgtttttttatcacgaaagatctcttgtctgctaggcgattgttctgctgaaaacaagacatcctccaaagagatactagccatataatgcaagctatcataaatatcgttcagctttttctgattgatttggagcttactgcataattctttgtcagtagcttctcgtttcaattcttgctctaattcctgcttagcccgataatagcgagtcaaattgtcaaatttataacgagacaaccgaccgtgactgcggatctcatcaatgatggtcccacggatccgtacataagcataactttcaaatggtactttcttttgtggatcaaatttcttaagtgcatcgatcaagccgatcactccagtattgaagagatcttcgtagtcataatcggagcttttaacagtgatccgagcgatgaccttttcaactaaaggcaaatatttgataacttgatcttccatattcatctcatacaagaaaaaagctcctttctgaaaataccgggtgaagtaattgtcttctatccttgttcctgcaaatatgtgttgcaaattggaatgtgacgcttactttggcatagtttgtctcacaaatcagaatgtaacgcgtactctggcatagtttgtgtcacaaatcataatgcaacgcatactctggcatagtttgtgtcataaatcataatgcaacgcatactctggcatagtttgtgtcacaaatcataatgcaacgcatactttggcgtagtttgtgtcgcaaatcgaaatgtgacgctttctctggcatagtttgtgccacaagtcagaatgtgatgcatactctggctatgtttttctcacaagtcagaatgtgatgcatactctggccagctatcttcaacacgccttcccacagagtgccttcctaaaattgcaactgcccgactgcctcgatcccgatttcatttgggatctcatttaacgacaaaattgccaaatctgggaagttaaacgacaacaactttctaaacgcagttctagtctgtggatttgtcaaaaggacaaaggaaatattttccaccagcattttttgattcagctgagtgatcgcatccaacatcttattgaccgtatccggctgcaaaacaggatacgaaccagttgctgtttttttaatactctgtgcaaccatttcttcaattttgggatgcacagtaacggcataaattttgttatcttcaccgacatacttgttggcaattgttcttcttaatgcttggcgaacgtattctgtcagcgtttcggtatctttggtgacggtcccataatctgccagagtttctaagatagttgataaatcattgatcggtaccttttcttccaacaaattctggaggaccttttcaacttctcctaagcgtaaaatatctgggatcaattcatcgatcacaacgttgctttgttgcttaatgccttccaataattgcttaacttcttggcgtcccaaaagttcaggagcatgtgagtaaataacttccttcaaatgagtggcgataacagtcaaaggttcgataactgtgaatccttgcaggtcagccgcttctttatcactttcattgatccacatcgcttctaaatgaaaggctggttccacggcttggatgccattaaacgggatctcatccccagtcggactaaagatcatgtatttatcaggataaatatcacccgtgccgacctcattgcccttgatcttgatagaataattatttgcatccaggtacaagttatctcggatcctcactggactgaccaagatccctaattcatgagcagtttgtttacgtaaagcaatgatccggctcatcaaactattgtcgatcgaactatcgaccagcggtatcagtgcataaccaatttcgatcgctaaagtttcgacttggaaatcggctacatcttcgtcttcttggacatcttttttcttttgtaaagccaaagtctgttttcgttgttgctcttccttaactttcttagcatcctgttgtttgatcaggaagctaacaccaagtagggctaaccccataaccataaagggaataaacggaaaaccggggacaagggataaaaccattaagatccccgctacgatccggaatatttgcggattgcgcaacgcatcttcagcaatatctttaccaaacgtactatcattatcagagcgagtaacaataatacctgaggcaattgagatcaatagtgaagggatcgaactgaccaagccatcaccgatcgacagcttgccaaactgtgataaagcttccattgcgctgagatcacctttcatagtaaagatgatcgttccaccaatcagattgactaaaacaatgacgatccccgcaatggcatcacctttaacgaacttgctggcaccatccatcgaaccataaaaatctgcttcacgttgcaggtcttcccgtcgttttctagcctgcttttcatcgatcaaacccgagttcagatccgaatcgatcgccatctgtttccctggcatagcatccaaggtgaaacgggccgacacttctgaaacacggccggaaccgttagtcacaacgaccaactgcacgatcatgatgatcacgaacaagatgatcccaacaatatagtttttccctgccataacgtcagcaaaggcggcaataacatgtcccccatcaccttgtgttaggatcgcacgagtcgatgacatgtttaaacctaacttgaacatcgttgtgatcaaaagtaaggttggaaaagtagtaaattccaagactgagtgagtaaacatggtgatcaataatatgttcatggcgatcgccatgttgatggttatcaaaaaatccaagactggcagcggaagcggaatgatgatcaaaccaatgatactgaccaccaaaagtgaaacgatcaggtcagctggtctgagtgcattcttcttagctgctttttgcttgtttttcatcagttactctctctcctatcaactcaaatccggttcaactttaaccagacttatattttatacttagcttcttcatccaaccggtagaccaaagcgatcaaatcagcgactggctcaaaaaactcttccggaatgaattctcctgcctcgatcttgagataaattgctcgtgccagcggtttattctcaatgatcggtacatcattttttctggcttcttctttcattttcatggcgacctcatcagctcctttagcaagcagctgtgggactggtgtttctgtcttatcatacttgattgccaacgctaaatgagtcgggttcgccaaaacgactgtcgcatctttaacttgggcgatcgagttccggaccatcgcctgatacttagctttccgctgcgctttgaccttcggatcgccttccatttgtttcatttcttctttgatctcttgtttagtcatcttcaatttcttagtccgactgaaactttgataggcaaaatctgccaaccccaaaaccaacaaaaccaaggcaatctgcatccctagttctttacaaaaattgagaataaaaaacaagatcttggcaggaccaacagaaccagcatttaaaatgtcacgtaacgtagatatgtatttgcgataacacagatatgcgatcagtaagaactttgccagcgtttttcccaggttgactatcgcatccagactaaacatccttttgaaaccacttaaagggttcaaacgtttgaaatcaggctttaatggtttagccgtaaataaaaaaccaatttgcacaaaattccccaaaaaactgatcaaataaccgacgaccaaaaatggtgctgccacgatcaaaaccgttaagatcgcctgcaagccaaccttaggtaggtctgcgtataagacctggtagttatccaactgctcgataaagcctgtcatataaggaaaaaacttgcctaatccaaattgccaagcaggaataaagataaacgaaaaggtcaataaagccaaagcagctgttaagtctggacttctagcaacatttcccttcttgcgcgcatctcttttacgcttaggggtcggtttttcagttttaccatctttatccatgaaataacctttcctttatcagactatgcctgacctaccgaacgcaggaactcgactagatactcatatgactgtgggattatctttcccaacaattccacgacatttggcagcatgatcaaaaagatgatcattcctacagtagatttaagagacaaacttaacatcagcacgttcatttgcggcacagaccgtgacaagatccccaatacaatatcgatcaccatcacagcaatgatcaaaggtgcagcaacattaaaagccatggcaagggtcttactagtcaaaatgaccacacccttaacacttgcattcgtcaaagtggcggttcctaaaggaacaatcgtaaaagatagcatcacagcgcgaaacaattccagatgcaaatttaacatgaagaaaactgccagtgccaaccagtagtacatccgaccaaattgtgaactggaaacttccattgtcctgtcataagcctggcccatcgaaaaaccattttgaaaatcgatcagggaacccgccatgatcacagcttgaaaaaccagttgactaacatagcccatggcaagccccaataaagtctcctttaaagccgccaaagcgaagataaccacactcatcgccttgaccttgccaactaaaggaatggcagcaactaccaaactccccccaacgatcagcttagcagtattaggaaaacttctttgtgataaaatcggcgctgtgaccataaaagaaaatatccggcaaatcaccaaactaactaattgtacttcggccactgacgtcacacccccgagatcaagcggaagatatattccgtgaattcttttagcgttgtgatcataaagtttccagccaagatcagggtcacaaaaattgcgaccaacttagggacaaaactcaaagtttgttcttgaatctgggtcgtagcttgaaagatactaatgaccaaaccaacgaccatcgcaactatcacgattggacctgaaactactaagattctgatcaccgcttcacgcatgaccatcaagactaatgaaacagacattaagctccccctctaactgaaactatgaactaacgattcgactaacaagtaccagccatctaccatcacgaataataataatttaaacggcaatgagatcataaccggcgacagcatgatcatccccatcgccatcagcacactcgagacgaccatatctatgatcaaaaacgggataaatatcaaaaagccaatactaaaggctgtccgcagctcactaataataaaagccggagtaagtgtcgttagcggaactgactccacatttttatagcgatgcttgtctttagaaacatctaagaacaatttgacatctttttttcgagtttcttttcccataaattccttaagcctgacctctgaacggttgaatgcttgtttttcagtgatctcctgccgactataaggttggatcgcttctttatagatatctgtataaacaggcttcatcgtaaacagggtcaaaaacaaagccaagccaagcaaaacttgatttggtgggttttgctgcgttcctaaggcacttctagtaaatgaaaggaccatgatgatccgtgtaaaagatgtcatcatgactaacaacagcgggaccacggataaaatcgtcatcatcacaaacacattaacgatctgcgacgaatttccgctctgtccactattgatcaaatcagtaatgccacgagaaacatcatcgaggccagctgcatgcactgaaactggtcggaacaagcaagccgttaaggacaacccgctcagtattttactttgctttttcgtagtcattacttctttctcttattctgcagcttgatcgtcttttgcttgagaatggccgcaaaatctattttttcactcgcttgatcatctgaactggtaaataattgctcaacctcttcttttgataactcagagatcaccgtactgccttgttctgccaagctcatcaagtaatagcgctcgatgacttgcacgatcccaagtgcggaagtttttgaaactgggattttcttgataactcgaaattgccgatcctgtggagcaacgaatttctgtaagtattttaaaaataagttgatcaaaacgatcacgataattaatccaaccaccattttgatcaacgacaacgttaactccatttgaatactcctcgtatgatttaacttattggatcacaaaatctgtcacataaacttcttgcactattgaactgccaaaatttttattaatagcctctttgacttgttctttgacctcatcgatactttgattatttttcaataaatctgcggccctttttggtttcaaaacacggatcatgctgtcacgcactaaaggcatgtctttttttaatgcttttgcttgatcatcgtcagccactaacaaagagacctttaagcgtaaatattgtggatcagctgcatcatccgttgccaaattaacaataaacattttgacgtttaccagacgctgtcttttagaaatggcagctcctgtttgcactttttcagctttaggttttgcgtcttgactattaaagtacttgccgaaaatgatcgtgccggcagcactagccccaaatgctaaaacgactactaaaacaataagcaatccccatttgatgccacctgctttagtttcagttgtttctacttcttcattcttcttcattgtttccctcgttattcccttcaaaaagattctcaccagaaaaaattcggtgacgatattctatgatcgcttccctaatttcaaacgctgtgtctctaactaccagcgttttcccatcgacaagcgtgattactgtatctggggtttcatcaattcgatagatcaaatctgggttcaaataaaattcttttcctttaaatgaagttaacaaaatcatgaacctgccccctattatttatcctgtacataaaataaaaattttaccttacaggttctttttccccttttgatcaaattgctgcgctcactattctaggacagctcctcaagccaggactttccgtctaaccaacttccacacacaatgctaaaaaacgcattatggcctagaagtccgttagtactcgagtcctacccggcttacctcgctcactatcttaggacagctcctcaacgcaggagtctgcgcctatctagtttaaacatcacggtgccaaaaacgcaccatgatgtctaaacccgatattgctcgtctcctaaccgcgttgtttcgctcactattctaggacagtttctcaacgcaggaatctgcgcctatccagtttaaacatcacggtgccaaaaacgcaccatgatgtctaaacccgatattgctcgtctcctaaccgcgttgtttcgctcactatctctttaggttgatcaattcttgcaacatctcgtctgacgttgtgatactccttgcattggcctgatatgctctgcttgtaacgatcatgtcagagaattcttgcgctaagtcaacgttagaatcttccaatgtccccgctaataaagtgttggtcccatctgtaccaggtactaaattattggcattaccagaatcctgtgatatttcataagtgctgttaccgatcttgcttaagccggctggattactgaacgtagcaatcgacactgtaccgatcacttcatcttccgcgccataacgcgcagtaactttgccatcaggaccgattgaaacgtgaccttcaactaacttttcaccagctgcattttgagctggtactgtaattggagttaacgctccgccttcctgtccgggagcatagcccatcacacgtaaaccatcagcattagtcaagttgccattagcatcgatcttcaaagcaccgttacgtgaataaacctgaccattattaccatctcgctcaaatactaaaaacccgctaccattgatatataagtccaaagcacggccagtcgtgttttgaataccttgacccatgtctgtatcgatcgcaccgacctgaaccccaagtccaacttgcttaccatcaataccgccaacggttgcacgtggtcctgaagcattcgcagttgtctgacttaaaatatctgaaaagttagcacggcttgacttgaagccgatcgtgttcgcattagcaatgttgttggaaataacatccaacctggtttgttgactcttcattcctgaaacacctgaatacaatgaacgtaacatttaaaattcctcctatttgtgtagcatctttttaaattttgctattttttaatcttttggttctctaacttctttgatggcacccatttcatattccgtaccgttgacggtcagcttggcaataccgccagtaaagttgactttatcaactcttccttgcttttcattgccttgttcatcaacaactgtgacattcttgcccattaaattgaaagcttgttgttgctgccctaaaagcaaagaattattcatcattgtcgacatattatttaattcctgtaaggtagcaaattgtgccatttgtgaaatatgatctgtaccactgctattggaatctccatctccggtcatggaagggttagacattgatgtcgctaagatcttcaaaaaatcatccattgaaagtcccaaagcatttttagcagcaccgttttgtgaagtactttttgttatctcactcgaactgccaagactgtttgcttgtacaccgcttaaattgtccatgaaatatattcctcctttgatcacgcatactctgagacgctcaaaccaacaaactgatcgttccgtgcttgatttgttcttcgcctggcaaatgttcttcactgaccacttgtgtcctcgtcttgtgcgaacgtgcaaatcggcgttgctgttcttgctcattttgcatgaaatcaccagctggaccatctcgctgctcgcctaaaagttcagaagtttccgccgtttgtctcacagtttcaacttgtttcaatgttttagtcgttggatcaagctgcagctgctccatgatctgctctaatttatgtgtgattttttgtaacatatcacgtgcagtactattttgaacttcaaattctaggctgactgcctgttcattcgtctttaccgcaactttcatctcacccagattagccggtttcaaattaaaaactatgctctgggtattgcccttactggataacaagcttttctcaactactggagtaagtgctttttgcaaatttctcacgacctgctcgaccggtctagttatcgttgttactttttgccccacattagcttgcgtaactgtcgcgcttttttgttcaactacgcttaccatacacgttctatctgtaagctcactaaaatctatgatttcagctgcttgtttttgtcctgctagcgaagctttcgtaccgatcaagatttttgaactaactgataaaatttccgctgactgttttagcgacgatactgaaagctcgtctgccatcgctgcaacttcaggtgatgttttaatttcttgtttacccagctgccctgctttagaaactaacgggctctcaatgatccttgtaggttgaaccgactcaacttccagatcagtctgctgagcagcttcctgcttgatctttgtgtccgaactcacaaccagatttattgtcgagttagattcttgaatagcctggctttcaccagctgacttagaagttaccatactaacaaagtttgctatctgttccttcaaggtcgcttgctgggttgcagacatttcatccaagtcaattacgctttgtgccggattttcgccaaattgctcggtttgttgtggtgcaacgtcattgtctgcaataatttcggctatcggtcctgccttggcttgctttaagtctagtggaggagcagcatccttaggtaatttttcattttttccggcgttatcattttcttggagcggttcgactgcttctgattggtcatgctcgatctctagtaaaatattttgctttttcaaatgatcgctactgctaactaattccttgagtccttccagcaaatcaggcgatatttggacttttccttgcttgaccaagtcatccaaagaaactgtaccgtttactaactgttggaacgttttcgagtcaatttgcaagacttgctctagctctttttttgtttgcgaatcagtagttttaatatgtttgttaagcatgtctttagaagtctctagtcgatttttagcctttttttgtctgaaacctttatcatcattaaccgcaatttccggcttatcttgtgctaaaaaagcctgaaatttccccgtttgttttttggttggcttggctttagcaacctgcaaaccagcaattttcttacctgtaactaccttttgcatttcattgtcctcctttcaaacccttgctttaacgtcaaggtcaagcgatatttacattttgttgtggccggtgaaaatcatccaactgcttttgttcctcatgggctagctccttttgatattgtgcaagctgctttgttttaagccgctctaatattttccgttgtttctgtgcttcgatcaattcactgcgaatttgctctttttgtgcttgcaaccccaacagttgatcgtgacaaatcatgatctggtcgttaagagcttgaatatagcgtcgtgtgacttgcattctgctaactgaaaattgtggagtttccatcatgctgtctttttcttgcatgacttgatccaattcagtatttttctcgttttccaggcggttgacttcagcaaaatgccccttgacctggtcttcaacttgcaaacgatattccagcactttttgtaatgaaaaattaaattcttccatccctgatctccctacccttctgcagtgatccgaccgtcacctaaaacattattcgaagcaaacaactgctgcaatctctcctctgtatctgtgaaacttgaaaattcatccacggcttgttgcaaaaagtcatcgatcggtttgtgcagctgcacagcatagtcgatcacaggatttgttccgctcttatatgccccgatatctatcaaatctttcgcatcagcgtatgttttcaaattttcacgcaattcactggcatggatattatgttcttgagagaccaacgatttcatcaaacgactgacactaggttgaacatcaactgccggataatgattttgggccgcaatttctcgcgataaaataatgtgcccgtctaagatcccgcgaactgcatcagcaatcggttcgttcatgtcgtcaccttcgaccaagaccgtataaaatgctgtgatcgaacccttgtcagacattccgcttctttccatcaacttgggtaattcggcaaaaaccgaaggagtataaccccgggtagttggcggttccccagttgatagaccaatttcacgttgagccatcgcaaaacgtgtgaccgaatccatcatcaaaacaacttttttgccctgatcacgaaaatactcagcaattgccgtggccgtatatgcacctttcagccgaactaagggcggcatatcagaagtagcacacactacgatcgacttagcataaccttcacccaagtctttttcgataaattctctcacctcacggccacgttcaccgatcaaaccgatcacgatcacatcggcctgacaatacttagcgatcatccccagcaaagtacttttaccgaccccactgccggcaaagatcccgactcgctgtccctcgccaaccgttaataatccatcgattgctcgaataccagtcggcatgattttttcaatgtcttgccgtttaaatggatctggggcttcctgcatcgctggatacccgaccatttcagactggtcaagcttggaacctttcaatggacgtcctaggccatcgaaagtatgtcccagcatttttggcccaaccttgacttcaagtgtcttgccagttgcagccactaggcaacccggcgcgatcccctctagctcatctaatggcatcaataagaccgtttgtttaacgaatccaacaacctccgtcactgtcttttttcccgcttttttcgcatagacctcacagacttcaccgacgaaggcttgcaaaccttcgactttgatcacaagaccaacaacttcgctgactttgccgtataccgaataaaaaggatattttttcgcttggtttaaataatttttaaaggggatctttatctttgtcatttatttacctcataattgttccagaaaaccttgtaattcctttttaatgtcaatatcaactaccgattcgtttgattcgacacgcagctgcaaagcatttaaactatcatcatcaaaaattatgtaacgcagatcaggaatttcttctttgacctgctctaacttagtggtcagtgattcatgataagcggagttagcccagaccatcaatacttcatttggtttttcgagttcgaataataatggactcaaaattgcagtgatcttttctggcgttagttccaactgcgtcttcaaaataatttcggccaactgtactgcaaaagaagtgatctcatcctgtttttctgccaggtactgttttgactctgccagactttgctccacgttatcttgtgcctgcttgactagaggtgccattttttgttgtccttttgtcacagcctcctggtatccatctttttttccctgagcataaccagaatcataggcttcttgcttgatttctgctgccttttgttttgcatctactaacatctcagctttcagctgttttagcttttgctggtaagctgccgtctgatgtgctaatttagcgtcaagagctgttaactgtggatcttgcttttttatttgaggaacaaaatctgctgtctttataccaactttcttaccatgcaggggcattgcctgctgtttcaaaatattattagacaatgctgtcttgacctcctcgaccaatatagatctcgcctctttcgtctaacttccgaataactgcgacaactttttgttgtgcttcttcgacagctgataatctagttggacccataaattcaagatcttctttgatattttcaaccgcatgttgtgacatattaccgaagataaagtctttgatacgatcatcgctgcctttcaaggccagctctaatacatcgtttgtcacatcacgtaatactttttgcacatccaacgcttgcaaagtagtaatatcttcgaaagtaaataggttggcctgaacttcactggccaattctggctgtctgctttccagaccggccaagatcgtcttttcagtactgcggcccgttgaattcaagatatcgaccaatgcgccgacaccaccgatactctcacgttcaccatcaaccacattggaaaacttatcttccataactttttcgatccgctgaatcgtttctggtgaagtggccgaaatcgttgccactcgttcagctacatcagattgcaattcatctggaaattctgacaaaacactggcagccttctcagcctgcatataacacaatatcaaagcaatagtttgtggatgttcttctactagcaaattaactaattgctgctcattagcacgacgggcaatgttaaacggttgttcccgcaactggatcgtgttcaaaacatccagaacttctttggctcgttgcggccctaacgaattaactaaaagatcctttgcgtagtcgatcccaccatccaaaacatattgtctggctgtggcagtgtcgacaaattcatcgatgacagcattcttttcttctggagtcacataatctgtattagctatttcataactgactttttgaatcatactgtcaggtaaaagtttcattacctgggaggacgcttctgaccctaaagagatcattaagatcgccgctttttttactccactcaattgagccatctcttatttcccctcctagtgatgatctttcatccaagctttcagcaattcagctgtaactgctggattagtctgggcataatctttagcctgtttatccttagcttgtctttctttgacttctggtttttcctgcagaggtactgctttttcctcttgttttgcttccggtaacggctcactattcgctgaagaagtaggtccaggttgtggtgaatcatcagttacatcgacatcataatcatcatcgtagtagtcatcatcgtcatcttggcgtttcttgcgaatgatcaaaaaggctgcgataccagcgattgcgatgacaccgatcggaagggcgatgtaccaccacggcacattattcttcaccgtcttagtcttatgaacttttggtgtcgtgtctggaacatctaaagcttgaacagtaactttatcaccacgatccttatcgtaaccgatggctgaacgcacaatacttttgatctgcgcctgctggtccccactaacatctccacgaatagcaacagaggtcgttaatctcttcacagttcccggtgcgctaacttgcttagtcacatcagtatctaattcattattgatcgtccggctatatgaagcgccattatcggtattatcgccagttacgttagagacattatcatcggtttgaccagtctgtgcttgttggatctgttcttggttcccattagcttgaacattttcactccgtaaatttggattgctatatttcgtagtcttgcgttccagtgcgtcaaaattaaggtcagcgttaactgcgacgctgattttgtttccatcagctaatgggcccaaaacacgtgtgatcttcttttcaagttgtttttcaaactgtttttggatctgcatatatttactgttcgcacctgtcagatcatcattgtcattattcccatcagccaatacatttccattactatcaacaactttaacgttttcggctgttaatcccttaacggcacctgtggtcaactcaacgatccctttaactgctgaatttgagatcgtgttgccattcaacgtcaatgcaaccgatgctttggctttttttcctttggcatcatcactaaagacatcatcatcaggcatcgttaacattactttagcttttttgacagcatttaaagaaccgatcgaacgttccagctcaccagtcgttgcccgctgatacatgatcttacggtcttcatcagtggtcatcatgctggtatcatcaaataactcatagccttgtgaactatcgggcagtttgttatcgacggccatatcgatccgatactggtcgacttttgtcttatcagctaagatcgttttaccatcatcttttaacttgtacttgatgtcttgatcttccaaatctttcgtaaccgtcccagcgtctgcgtcacttaaattcgaaaacaaaacggcatactcaactctggtgttcagataatatacgatcccaccagcagcaagtatgctgatcaaaccagctatgatagcaatttttactaaacgatttagattagaccatttgtcttttaagtttccaaaaaagtcctttactttatccacttccaagcccccactacacgactaaaactgcatgttcttaagatcgttataagcttccaaagctttattacgaacttgaactgcagtctgtaaagttaattgactttcagtcatattgatcatgacctgccctaagtcatcttgttttccactgatcatatcggtagtcgactgatccataactttcatgcttgaatttaaaccggataaagcatgatccaaataatcaccgaatgttttaccggcgcctttaactgtctgatcagaattatcgagtccagtaactttgcgcagttgagtagcataattatttaagccgttaataccattgacctgtgccattttatctctcctaattttctgatatttctagtgccttactcaagatctgcttattgacctgactcgaagcaacatttgcttcgtaagatctttgcgattggatcaagtcgatcatctcatccgccaagttaacattcggtaaatgaacataaccattttggtcggcatcggggtcatctggtttataactcaacttctcagtttgatcctgtgcaatgccagtcactcttacaccggaactctgtcgtttgttggcttccatgatatttccattgtctgcttcgacttgacgtaaattttcagcgaattgaactgacttccggcggtacgggccaccttccggcgttcgtgttgtattgacgtttgcaatattagttgatgtcgtatcaagctttaaccgctctaaggctaagccgctggcattgatctgcaatccattaaaaatactcactctgatctcctcttctccaatttagtcttaccattaatgattcaaaacataactcatcatttggtaacgccctttgagttgtgatgtcaacgcgctataattcaaaccattttgtgcctgatttaacatctcaacatctaaatcaacgttattgccattttctttaacagccgtatcattgcgcacgctttcatgcggttcaattgccccgcctgcttgcatatgcattttagatgtagtttttaggtgtgtttcttggtccaaagcattattcaaaacactttcaaactcgattcgtttagctttgaaacccggcgtattgacattagcaatattatttgcgttcaattgtgctctattagaagaaacgtttaaagcttctttcattaagccatatgtattttccaaaattaattacacctattttctttgatttaacactaatattttcaaactttttatatttcaattttcatagtagttgcttgcagccaagatgtcccctttatcaaactttttctatatttttcacagcattataattttagctattaacatactcacaatcaagttaatttttaagttattttcaattattttattaattatttttttaactcgtcgtttgtaaaattaagttagaaataaaaaagccatttgtggtagacttttgaatatccctaatcaaaagagaggtaaccacaaatgacttataaacatcttaccacatgtgaattaacctttatatataacttttggaaataagatattaaagcctatcatgccgctaaagctcttaaacgttccagcgaaaccgtttatcgtgtttaccggtttctagatgctggtaattcaattagtcaatttcaagaaaatcatcgagttaataaaactcattgcggtcgaaaagcaattgaattaccagaagatgaaaccaaatacattaagcagaaactcgcattaggttggacccctgatacgattattgttcgagctgagatacagatcagttgtagtatgagaaccttataccgactttttcaaagaggtgttttcaatgtgaaattgttgccaatgaaaggtaaaaggcatccaaatggttacgttgaacggcgtggtaaagctggccgactcggcagaagtatttatcaacgctatcaggattatcctcattttcaacatgaatttggtcatttagaagcagacaccgtccaaagcaaagcacatcaaggtgcagttatgaccttagttgagcgtctctccaaagttgaaatcattttaaacatccaacaaaaatcggctgaatgcgttaataaacatcttaatcaatggttgtcccaacagccaaaacaccttttcaagtcaattacttttgataatggtaaagaattcactggttggaaagaaatcgcaaataagcatgatattagtacttattttgccgaagttggggctcctaaccagcgtggcttaaacgaaaataataatggactaattagacgagatggtctcaacaagagcatggattttcgcaatttaccaaatgctttagttcaacaagtcagtagccggcgtaatcgtattccaagaaaatcattaaattataaaacaccaattgaggtattcatggaaaacatcacagataaacagctatgttatttctaacttaatttgacatttcaagagactaaaaaaggcgaactatcgcatttatgtatgccatttctgaaccacaaaaattttgaaagcgccttgattgctaatttatatataaatttaaagaatgtctaataaatttgcttgttaatatacaaatttaaaaattagtcatttttttggcattttttacttatattatatttcaaaaattattcttgttgaaataatttttgcgaagaaaatgagattttcttactgaataaccgaattacccacccaattttcatttttcgctattccatattgaaaatgtacttcaactattttcaataataatttgctcagtttatttttttatcactagttccactctcctatttttagcacgccccgctgatgtatcgttagttgctttggggttattttcaccaaaagcttcaattgagacgttgccttccgtcactgccttttgctgcacgaagaaccgcatgactgaaactgctcgagcagcactcaattcccagttacttggatagtctttcgattcttgtggcacattatctgtataaccagcaataatgacctcattttcttttagttgttgaatttttggccccagttcctttaaagctgcagcagaatcggcagtcagatccgcactaccgctgtcaaataaaatattgctatccaaatttaaatgtagtccgtcagacttgagtgaagcttttgtgttttttcccaagttcatctctgcagcagtttcgtttaaactatgagcaatttcttttaattgctgttcttgattctgttgtgaaatactgccctttactccattttcttgtttgatcgctgcttttttagttttagggtccggtgcctgactatctttttctttattagttactgatggtgaatcaagttcgattgcgtttgatccaccgactgccgcacttttatgattttgttgctctggtgacaaagccatgatcgacccaaactctgaactgattttttggaacttactatcatcgaccttggctgaagcaaacatcacaataaacagggcaagtagcaatgttaacatgtcagaataagggagcatccaggcttcactatcactatcattttttttctttttcttacgcatgcctgtcccactttctttccaatctactcatttttttcaatgtcagttcgtctggtttcactgatcatactttcaaggttcttttccattgttttcgctgaaactccttcttcgatcgccaatgtccctgccatgatcagttctaaattttgaatttcttgttctgatttacgttgcagtcttttagcaaaaggcatgaacactaagtatcccataaaaataccaaataacgtcgcaacaaaggccgatgagatcgactctcccaagacaccaacgttatctaagtgtccaagtgcaccgatcaagccgatcacggcacccatcacaccaagtgtgggtgaagtactgccggcagtttgcatcatggcagttcctttagcatgccgttcctcgatcgatgagatctcattttccatgatttcttcgatttcttctttatcgatcccgtcgaccaccatctccatgccgcgttttaaaaacgcatctttttctggatctaagttgttaacaggcgtttccaaggccaacaagccttcacgcctggcaacatttgataattctactaatttatcgatcgttgcgcggtaatcatacttttttgcttgaaataatactttgaaaattcctggtaaacgtttgatgtcagccagcggatatgtattgatcagcgctacaatgatccccccaaaaataatcatcatggcctcggggctaaataacatggctaagctagcaccttttaaaatcatcgctgccaccacgatgaccaacgcggcacagataccgatcagtaaaaacaggtccattttttctcctcctcttcactcttccattttatttatcggacaaaattgaaaagatttaaggaaactcattaaaaaaatttccaaaaaaataaaacgactacagaattaacaagcctgtagtcgtttcaactaaatattttgtttttggctaacttcattccaagtttccaataattcttctaacaatttaacaatgggcggcagcttttccttgtctttgctgacattagcggccactaattgttgcgtgataaagttatataaacgatttaagtctgtcgtaatttgactatcaaccgaatgatctaatgaaaatttcagctcatcaacaatgtcttgagctctaagcaattcatgatttgcctttaccatatcattttgattcaatgcaatttcagctaacttgattgctttgatgcccccagagatcaataaactgatcagcttgttaggcgaagcggtcaacacttgattcttcaaataaaaattacgttgcttttgtgcctgttttacatccatttattcaattcccccgccatcaatttaactattttgtaattccagcttgaagtcacggatcaatattctaattcgatcatcgtcccatcggtaattttttggtggtaagtcccacccctggaagacttttgacgatctaaactctttaattgctgcaacacttttttcttctctttcgccgttacttgcatcagactctgatattcagacattacttgttgtaaaaccactttttgctgcgctgacaagtttgactcagtttcctgcaattgagtcaataattgatcattggcttgtagtaaagctagaatggaagcagttgtttggtcccagtctttcatattttgctttaacttcgttaatatttgttcaacttctcgtttttccaaacttctgctcctcttttatgatcgttattattgttgatctacacccaactggctttgcatgtattgcatttgtgaatcagcttgcatcatgatcgagtctaactgggtaaactgtgcaatatattgttcccgtttatcggccaaacgcgcggtgaagtcatcgatctgcgagttcaagtctttgaccatcttatcaatgctatcgcttttattagtaatgattccctttttagtagcatcgttgctaataaattcattgaccaaactatttaatttagcagtatagcccgtgtccgtactttcgtcgaagctgtcctcaccttgaacatagaaaaagtcatggactttttccggtgaatcagcaagttgtgacttaaacttgtcttcatcaaggctcaaaacaccatccttgtcaacagaaaagcccatatcgaagggactcagactagcgccattgtctttatcggcttgtgtgatcatatttctcaaagatgactgtagccgttgcagagtcgaatcgccaaccagcttaccttgaacattagtcgaagaactttccgctgtggaagctgacggattgcccacatccaggtcacttttgatcaaactcattaagttattgtattgtgttacaaaatcagtagcggccttgactgtttttgaatcatcattcttcaaggataaagtgacggcatcttcaggcttgatctcttttttcaaggtgatcgtcgcaccatcgatcgcatcagagatcacgttactatcactttccatgtcaatgccgtctaggctatacttggcagcctgacccagatcagctgaagtatttaaccctaaggcagctaaagtagctgtattctttgtttgatccagtgttgtttctttggcacctgatttgttattcgtcaaaactaggcgcttgttgatcactactgccgaaacaccaatattttttgattctttattgatcttatcagcaatatcgagtagtgagtccttctctgtgatatcaatatcaacagtttctgggctatcgtcagttttttctccttgataagcaaaagtcagtttaccgttcaagttaagatcagtgctattcgtctctgctgcgctgacctggctaccagtcaacttagtttgcttagctaattgactgaccaacaactcaaaatcgccaccatttttggcgtcagaatttcctgagatcgttgctaggtcttcattcgaacttttagcaattttagaataataactgtcattattctgcaaggctttaagcttagtttgaaaattacttaaagctgatgaaatttcactccaggcagacttttcctggttatattttgtaaccttattttgtaacagcgttttaccgccagattcagcctcaatcaactgatcaacaacatccgttgtgatcccagagtactggcccaaaaagctgagccctgcattgggtgctgaggtagcacttgtaatatcagccatttacgtcactatcctttcttatcgaccgcaattcccatctgatcccagatttttcccaaaacatcaagcattttatgagaagggatctcctttaacactttgccgctttgcatatccaccatttcaacgtactgccgtccagtccgctgatgaatttcgaatttcattttaaaatcgcgacccagtaactttttattcaatgtatcaactgctttttgcagttcttgcgggtctacgactacattatcggctgaatcctcaacttctttaacgtttttaccatcatttaactgaaaaagtttacccaaatatttttcctgatctttacgaatgaatgattcatccattaatgaagtatccatttcataactatcagtcgcaactttctggattttattaatagccggcgtggggtcgactggtggaatattattgatctgcatgttacctgtcccttctttccgtgtcttacatatattcactccaatatttctagttaaattctcttttgatttagtcaggctgcgcgagtcaacttctttcggcttatctaagcaacagacttcgatgataagaacgtttcgaaatcagctgttccgacaatgcttggaagtccccgatatgccttcaccttgtttttagtcaggttacgaaatgcaaaagcttgcgcttaactaacttcaacaacaagtcgctaaagacatgacttattgttaaagtcccttaatgctcggcttcataccgcattttctccaccttgtttttcttagtcaggttacgtgagacagaaagctctgcctatccaaccttagcttcacatcgcaaaatacgtgatttgaagctaaggtccgatagtgctcactttctcccgtctcactccaccttgttattaaaaaaaccgaccgccgaataaacgacgatcggcctgtgccaataatattttgttagccctgaagtaatgacaagacactgtttggcattgcgttagcctgtgccaacattgatgttgcggcttgtgaaagaatattggacttcgtaaagttcatcatttcttctgccatatcaacgtcttcgatccgtgagttagcttcagaaagattttctgttgttgttcccaggttgttaattgtatggttcaatccattttgtgcggcacccagatcagcacgttgtcctgaaactgtttcgatagcagctttgatatgcgcaattgagtctctagcattggtagcattactcaagtcaacacctttacctggaacagctggaattatatgtccaggatctgtatcattttcaggtgttccaggagtcaaatcatcaccaacgcccaaagcatcagcatccattttcccaattttgacttcagcagtttggtctttacttgcaccaacttggaaagtaaatttttgattatcattattcaacaacttctgggtgttaaattccgtgttgttagaaatatcagtaatgttctttttcaaagcggtaacttctttagtgatcttaccacgatcttcgttagtcaaagtatcgttagatgcttgcactgccaaatcattcatccggctcaaaatgctatgagtttcactcaaagctccttcagctgtttggatcaaagaaataccatcttgagcattacgtttagcctgcttcaaaccaccgatctgtgctttcattttttctgaaatagccaaacctgcagcatcgtcgccagctttgttgatccgcttgccggatgaaagttttgccaaagaatcactctttgatgcattggctgcagataaacgtgaatatgtgttcaatgcagctacgttagtattaattctcattgtttgttcccccgaatattttgtattttgttgcttacacttattactatcggaatttattttaaatgtttaagtatgaaattaaacataattttgtttttttgtttaaaaaactgtccactccatacaagaagggacagctaaggtcaacctgtttatctagacagacttacattacaattcaaattattagccttgaagtaatgacaagacactgtttggcattgcattagcctgtgccaacattgatgttgcggcttgtgaaagaatattggacttcgtaaagttcatcatttcttctgccatatcaacgtcttcgatccgtgagttagcttcagaaagattttctgttgttgtacccaggttgttaattgtatggttcaatccattttgtgcggcacccagatcagcacgttgtcctgaaactgtttcgatagcagctttgatatgcgcaattgagtctctagcattggcagcagtactcaagtcaacgcccttgcctggatcttctttcgtaccagccccagcatcccaaacatcaccaacttctaatgtctcagcatccattttcccaattttgacttcagcagtttggtctttacttgcaccaacttggaaagtaaatgtttgattatccttattcaacaacttctgggtgttaaattccgtgttgttagaaatatcagtaatgttctttttcaaagcggtaacttctttagtgatcttaccacgatcttcgtcagtcaaagtatcgttagatgcttgcactgccaaatcattcatccggctcaaaatgctatgagtttcactcaaagctccttcagctgtttggatcaaagaaataccatcttgagcattacgtttagcctgcttcaaaccaccgatctgtgctttcattttttctgaaatagccaaacctgcagcatcgtcgccagctttgttgatccgcttgccggatgaaagttttgccaaagaatcactctttgatgcattggctgcagataaacgtgaatatgtgttcaatgcagctacgttagtattaattctcattgtttgttcccccgaatattttgtattttgttgcttacaaatatatatatcggttcagttttaaattgtttaagtcattttagaaacttttttagaaaaacgagttttaatctcagatacccattttcagcgaaaaaaagagccacatcttttatgatgtgactccgttcttgctatgaaatcaattggttctataatatttggtactgatagataaaaacttctatcagtaccaattttgttttatgataaaaaaatagagatgaagtccgcacttcatctccgaaaaacaatccctacactgaaaggaatgtcctacatggcgaattgtacactagatcttctcggaattaaagactcacgtttgcggtttgatcccaaatataaaaatgaggcaacaacttatgatttttacaaacaccaaaaagtgcgttttattcatctgctgcaatcttattcttgttcttgccccgtttgttgcaaaaaaatgaaacgtaacggctttaaaaccgttaaaatgattggcttaccttcaggtggtctgaccaatattttctcgatccgtaaacaaaaatatctatgcccgagttcaggtacatgtcctcaaactatcacaaaattagcggagatcaaggatgtcagagccaacaatcaaatctcacaagccgttaaataccaagcagtttctaaattaggtcagaatatctcacaaaaagacattgccgctgacttcggcatttctggcatgaccgtgatgcgctttgcgcaagaagtctctacttacttagaaccaaattatcattatttgccgcaaaatatcgcttttgatgattttaaatcaggcaatttttctgcaagcggcatgagtatcattgttatggatattgcgactcaccgcactttagacattgtcaggtcacggcagaatacatatttgcgcagctattttctgcaatatgaccgtcaagctcgttgggctgttcagactgttacagttgatctttatgcgccataccgttcttttattcatgaaacttttcccaatgcgatcattattgccgaccgtttccacgtcataactcaggcctatcgtgccttgaatcaagttcggatccaagctatgaaacaaggcggacacggttcacacgtttcccgtgctctgaaacattattggaagctcttgaccaaagacgccgcgcgtctcgattttaaacactatcacaaaagcagaaattttcgaaacagccagttgtgtgaacaagatatcgtggcacgtttattagacatgtctgccgacttgcgtttagcttacaattactatcaaacacttttacaagccatgcatcaagcgaatccagaactgttagaggaactgacccaatcagctgcgggaatgcctgcacccattaagcagaccaaccggactttacgtaagcatctgcaggagatcaaaaacagttttgaaagtgccttttccaatggaccagtcgaagggaccaataacaaaataaaaaccattaagaaaactgcctatggcttcagaaactttgcgaatttccgtctgcgtgttctagtggaattaaagaatagttacgtgagtttgaactttaataatcagataaaaaaagccgcccgttccattcaggaacaagcagcttaaacaagctagaccaattacttttcaattttaataatttatttcatcagtaccacttgataaagaaccaatcaatttaataccagtgattcttgacccaatgtttctgtgcgttagtccagctgccgtatctttgttggacatattgagccgcaactttttcttgattggcaggtgaaaaatcaccatgcaaataattttgatccagctgatatttgccaatatagcgtccatttcgagcattatagttattgctcgactcatgctgaataatataatcacgtgcacttttttctgccccagccaatgttggctctaaactgttgctagaactggcagaagcgttctcatcaaggtcaacattcgctagtgacgctactgttccagcatcattgaccatagaggtcggttgcgcagccgcacttatttgtgctcttccaggaatagttaagttctgtccggctagaataaaatccggatcgtttaactggttagcctgagcaacagcttgtgtagtggtgtgatatttctctgccaactcagagacagtatcgccctttttgattttgatcgtttgttgtgctgtttctaaagcattcgaaaactcagctgcttgctgcgaattagtcgcctgtgttgcggcttgcatcgacccattattatgaacttgcaggtcattattaactaaattcatttttaaaacccgtttccttctttaattactatcacgattcctaattatatagtgttttaaaatattttacagtatctttttaatatcgatcgaattaatttgcttttcccagcaattatattgaatacacatttggtttgtcgaaactttgttcagttttcaaagatctactgtgttgaaacagctttttaagtatatcacacaacttatcgtctgtcaacaactatttttaattaattattacttagaagttataactccttaagcaacatataatatgttatcatgttttcaattaaataacaagtgtttttcaaaactttttatttaattgacgatactgcttatcactaatcagctcgcttttgacaactttattagtataccaacttgcaacccgtgatgcaaggattttctgtaaataaataataattatcttataacaataaaaaaaggcccttagctatactaggggccttcgtttttctactattaaacgtagaggtttttaacttgtttttgtaattccggatgtgctaagaactcatcatagttcgtttcagcacgttcgacaacaccgttcgctgatacttcaatgatatgatctgcaattgtttgaataaactgatgatcatgcgatgtaaagactaaagcacccttgaaatcgatcaaagcatcattcaatgaagtaattgattccaagtccaaatggttggttggatcatctaatagtaaagtattcgatttttgcaacataatcttcgatagaatacaacgcactttttcgccaccagaaaggacattgatttcttttgtgacttcatctccagagaaaagcatcttgcctaagaaaccacgtaagaaagtattgtcatcttcacccttagcggcaaattgacgtaaccagtctaagatgatgagttgatcatcattgaaggctgagttcgtatctcttggtaagtatgattgttgacttgtcacaccccaggtaactgtcccagtatctggctgcacttcacctgctaagatttgcattaagacagctgtcgcaacgtcatttcgtgaaacgattgctgctttttcgtctggcttaactgaaaagctgatgttatctaacactttaacaccgtcgattgtttttgaaacattctcaacccgtaaaagatcattccccaattcacgttcgaaatcgaacttaatgaatgggtattgacgtgaagagggttggatatcttctaatgtaatcttttctaattgtttcttacgagaagtggcttgttttgattttgaagcattggcactaaaacgcgcgataaaatcttgtaattctttgatttgttcttcttttttagcgttaacgtttgattgtaacttagcggctaacttacttgattctaaccagaagtcgtagttcccaacgaatgtcttgatgcgaccgaagtccacatcacacatcattgtacagacttggtttaagaagtaacggtcatgggaaacaacaatcacgatgttcgggaagtctgctaagaaatcttctaaccattcaactgaggcactgtccaacccattcgttggttcatctaataataggatatcaggtttgccaaagagcgcttgaccaagtaaaaccttaatcttttgcccttccatcaattcactcatcttcacatggtgtaaagattcatcaatccctaaggcttgaagtaattgagcagcttctgattcagcatcccaaccattcatttcagcgaattcagcttctaaatcagcagctttcatcccatcttcttcagtgaaatcagctttagcatatagggcatccttagcttgcatcacttcatacaacttcttatgaccttgaatcacagtctctaacacttcaaattcttcaaaagcgtagtgatcttggttcaaactcgacatccgttcattagggcccattgagatatggcctgatgatggttgtaatttaccttctaataattttagaaaagttgacttacctgcaccattggcaccgatcacgccataacaattcccaggtgtaaacttcaaattaacgtcttcatataacttacgcccagaaagcgttaagctcatttcactaacagttatcacttgattccctcacttttctttcatgactctaaaaagccaaccgtttcatgtgaaacggctggctttctaccattgacaatatatgcttaactctaacatatctaatgactagttatcaaccaggctatttgaccttagcaatcttaccttgttgaatatagacacttagaatcccgatatcggctgggttgaccccaccaatccgactggcttgcgcaagtgtttcgggttgaattttttgtaatttttgacgaccttctgttgcaaggccttcaattgcatcgtaatcgatattggctggaatctttttagcttccattcgttttaacttcgcaattttagctttttccttatcgatgtaacccgcgtatttgatttgaatttcaacttgttccacaacgcggttatcaatgccttcgactgctggaataaattggattaaatcagcatactttacttctggccgttttaagaagtcgctggctaaaacaccatctttaagtggtgcctcacccttagccgctaaaaaggcttggatttctggggttggtttcaagcgaatggttgctaaacgtgctaattcagcttcaacggctgcttttttcacttcatagctgtcaaagcgatcatcattgattaagcctaatgcatgacccttttctgttaagcgtaaatccgcattatcgtgacgaagcatcaaacggtattccgcacgtgaggttaatagccgataaggttccttcgtcccctttgtgaccaagtcatcgattaagaccccgatgtaagcttcactgcggtccaagatgaatgggtcgcggcccgtttgcttcagagcagcgttgatgccggccatcaagccttgaccagccgcttcttcatatcctgaagtgccgttcatttgaccggctgtataaagattttcaaccactttggtttcaagggttggttttagttgccatggttcaacgacatcatattcaatcgcataaccaggacgcatcatttgggcattttctaagccttcaatcgaatgaatcattttgtgttggatttcttctggcattgaggttgagaaatcaccgacgtaatattcttctgtttcgcggccttctggctccaagaaaatttggtgccgaggcttatccgcgaagcggacgattttatcttcaattgaagggcaataacgtggacccaccccttcaattacgccggtaaacattggggcgcggtcgagattgtcgcgaatcacttgatgcgtcgtatcattcgtgtatgtcatccaacaagaaagttggtctttcaaataagcactatcaggtgtttcgaaactaaagtggtttggttccttatcccctggttgttcttccgtctttgaaaagtcgatcgtggtgccgtccacgcgtggtggggtccccgttttaaaacgcgtgaggacaaatccgttgtcttccaaactttcagaaagtttaatagaaggaattgaattattcggaccagatgaataggttaattcgccgataataatcttaccccgagaagctgtcccagccgttaagatcacactatcagcgctgtaacgggcaccagtgttagtgacaatccctttgcagacaccgtcttcaacgatcaatgattcagcaatcccttgacgaagtgttaagtgctccgtcgtttcgatagtccgtttcattgtccggtgataagcgtgcttgtcagcttgggcgcgtaacgcgcggacagctggccctttacctgtattcaacatccgcatttgaatgtatgttttatcaatattgcggcccatttgaccacccaaggcgtcaatttcacggacgacaatccctttagcaggaccacccaatgatgggttacatggcataaaagccaccatgtctaagttaatcgttaatagtaatgtttcgcggcccattcgtgcagcagctaaagccgcttcagaacctgcatggccggcaccaacaacaatcacgtcgtagtgcgctgcgtcatattctcgcatattttgttctcctttaatatggttcaagacctatttacctaaacagaattggctaaagagttccgtaatcaattcatctggtgctgaatccccggtaatctcaccgagcttatcccaacagttggtcatatcaatttgcacaaggtcaactggcatcccagctgcaattccactgatgacttcatctaatgattgttgtgcttggtttaatagaccaatttggcgggcattagtaatcatgaccgtactttgactattttcaatcccaccgaagaagagtttggcgatttgggcttccaaatcggtcaccccttcgcttgttaaaattgaagtttgaattacttcatccgcattcaccaatgtttggagttcatttaagtctaacaagttcggtaaatcggttttatttaaaataatgatccgtttcttatcagtggtggccgtgattaactcgcgatcttcaaccgttagtggttcactttgatttaaaactaataaaatcaggtcagccttggtaattgctgcgcgacttctttcgaccccaatcttttctaccttatcttcggtatcatgaattcctgccgtatcaacaagcttcagcggtaccccacggacgttgacatattcttccaaaacatcacgcgtcgtcccggcaacatccgtcacaatcgccttatcttcatgtaataggtgattcaacaaacttgatttaccaacattgggccgtccgacaatggccgttgctaggccttcacgtaagacttttccttgttgtgccgtttgaagtagttcaccaatccgcgctttcacaagttcggctttttcaagtagaatccgcgtcgtcatttcatcggtatcatattcgggatagtcaatgttgacttcaacttgcgccaatacttctaagatttcttggcgtaaattcttaatcaggtgcgttaaactcccatctaattgatcaacagcaacttgcatcgcccgatcagtcttagcccgaatcagatccatcacagattcagcttgggttaaatcaatccgcccatttaaaaaggctcgtttcgtgaattcacccggttcggccattcgtgcaccatagctcattaataattgtaagatgcggttcgttgcgacaattccgccatgacaattaatctcaatcacatcttcgcgggtaaacgttttgggtgcgcgcatgacagacaccatgacttcatcgactactgcgtcggttttaggatcgataatgtgcccataattaatggtatggctcgccacttgatcaagatctttgccgcgataaacgcgtttaataatggctaaactctcatcccctgaaagacgcacaattgaaattgccccctcaccaggtggtgttgaaatcgccgtaatcgtatcaaattctgtgactgtcgttggcattttaaatgcttcctttccgaaatagctgcataaaaaaagcgcttagcgtccacccctcccgtcattgtgtaaggggtggacaaagcactttcactactttatcgatatttaattagtttcattatacacgatttttttagagcgtcaattcacaacacctaaaatgtgcgcgctaattccaccacaattgaccggcgatcgccttggccttctgaatgagtttgaacatggtgattagttgctaaatgcccatgcacaattttgcgttcaaaagccggcattggttctaaaaagactggtttgccggtcgcaacgacttcacgggctgctttatcggcaaggtggctgacaatcgctgctcttcgctgccgataatcaccaacttctaggataatggtttgcttgcccttcatatgatgatcaaagtaagtctgcgctaaatattggagcgcattaattgtcttaccatgcttaccaatcaacaagccttctttatcggtcttcaaatgataagtcgtactccgatggtcgtgagttacatgaatgctgaccggtgtgccaatttgagccgtgatggcttccaaataggcgcttaactcagcttccgtttccacaccacttttccgcttttgcggcgtactagttaaattgtctgttggcgttggttcaactagctcttgaactggggctggggcgctttgtttaacttggcttggttgttcatttggcgttagccggacaactgctaagcggcgaccaaaaccgagaaacccttttttgccggcttccaatacatcaacggacacttcctcacgcgttagatgcatagcttgcaacccttcatttaccgctgcttgaatatcgctaccttcatatgttggcatttcaaaacctccgatcaatttggtcactccaactagtgtgagcgcccgattctcgtttattataccatgatataccaatttaaaaatagcatgtcattatctgagatagtccgccgtcaaagctaggaattgttgtacatctttagcgatgctatccgcggcagcttgccagaaatccggttgggttaaatcaaccccaagatgtttttgcgctaatgcttcagtcgacatattggccgtatcacgtaatagtgcgatatagtccgcttcaaaatcaggcattgtctgtgccttggcataaatccccatcgaaaaaagatagccaaacgtataagggaagttataaaacggcacgtcatcgaagaagaaatgctgtttgtccgcccagaatagcggatcataatcagtcaacgcatccgcataggcttctttttgagcggctagcatgagtgcttttaaatcagctgttgtttgcaggccattttggcgcgctgtataaaaatgtcgctcgaataaaaaccgtgcgtgaatattcataaacatatcaattgcgttagtaattttctgatccaataaattaatcttcgctgctgggctttgcgctgctttaacagtcgcatcactgacgattagttcagcaaaagtggaagctgtttccgcgacgttcatcgcatagtcttgtcgccaacttggtaaatcattaatcatcattgtatggaacccatgccctaattcatgtgccaaagttgcaacaccattgggggtgccatcaaatgtcataaaaatccgaaaatcatccgtttcaggtaaatcagtcatataaccacctggttgtttgcctggccgatcttcagcttcaatccaacgcttttcaaacgcggtttgtgccaccgaagccatcttgggactgaacgctttaaagttctgcatgataaaatccgctgcttcatcataagaataacgctgcggttgaaaatcacctacaaccactggtgcccaggtatcataccaagcaagctgttctttgcccattaacgctgccttccgatttagaaaatcgacaagcggcgctttattttgactaacgatcgaccacatcgcttctaacgttgcgggttgcatgcgactcgttgccaatggctttttcaaaaagtccgttgtgccatgtgcttgataatccgttaggcggaagccagccaaatgatttaacgtatccgttaataatggtgaataccgatcccaagtctggtaccaattttgaaagacgcgttggcgtaccttgggatctggatcagattcaaatttattctgcgcttgtcccgccgataaagtcgtctcaccatcggggacttgaatttcagcaaccaatgagtcgtaatgatcactccatccagttaaaccatctaacgcgaactggttaattagtttttccgtcgcttcatccaaaagttcagcaccattcgtccgtttttcggttagattaaactgaatcgcttgtaaggcaggtgtcgatacaacggttttaaaatctgcgtctgacattgcgaccaatttttttgtgagtgcgacatcaatctgattcgcatcattttcaagcgcattaatccgccccatcatcggtgcaacttgcggattgcgttcatccgttgattgaatcatattcacgaaactctccgtttgcttgagacccgcttcaatcgcttgtaactgttcagtgatttgcgttagcgttgcaaatgttggctgatctgtcgcaaacgtccagttctggaccgcttctaataagggcgtcatttgtgcagtcaaatccgccaatcgttgcgtcaacgctggtgaatcaatccccccggcaaaaatcggttctaaatcccattgttctgaataggtcatctctttatcctccacttttaaacgattgcacttattatagcgaaatttcgcgcaaagcgcgattaattcaaccagatccactagacattttgataatatctgttaaattaggaatgtaagcagatacatagctgctagaaaggcgatgtttatgatgacgattgaacaagtacccgctaatacaatcgcagatttaaaaacactgttaaaaacgacccaagtgcccgataaaattatggcaatgggacccgaactgatccaatacttaacccatattaaggcgagtcaattatcagacaccgaccatcttgggttcgatttagggagtgccggcattttaacgttaatcgaacaagtcaatacagcctttttcgatcacttccatatgtttgacgatgctgcaccgattgaaccaaagttaacgcgtaaaattctagtgctttatcatctaaaaccgattgatgatcagcacttcctccttcatttgaaacaattagactattaaacagcaaaaaatcgtaaccaaatcggttacgatttttttattcttaaagatttttgaatgattattagtcttgaaattagttatcgattattaccaatcatgatgctactataaaattaagaaaacggtttagaaccaattttaacaatttatctatctgaatttctattttttaatctagcgctatggaggattagccattgaaactatttctttttatattaacaacactcctttatttgctattagattatttaatgctaacctttccacctgtcgaaggggtggctcagaatgttcccctcatccttttaccattctgttatttttttggatcccgattcttgctgagaaaaacaacgattaaccgccataaaagcgggttacttattggtgccgtttgtgtcgtctgcgctatcgcaattcctcttgtacttgctgcctattacctattctaaaaaagaccaatcataatgaaaattcattatgattggtcttttaattttggaaattaacgtttcttagttgctttcttacgtgctttagcaagtgctttttcacgatcacgcttttctttttccttggcttcgcgttcgcggcgaatcttaaatggattttgaatcaccattgtttgacccactgaaaaggcgttcgttaccacccagtaaattgaaacagcagacgcgatgttcatggccatcacaaaaatcatgattggcatcacccacaacattgcggatgacgcagcattcttcgtgggttgcgacatcattgttagatacgatgttgcaaatgtaaagatcgcagccaagatagccataataaagtaaggatcagctttcccaagttgcatccataagaacgtcccactctttaaagcagctgttcgatagattgcttggtacaaggcaatcaacactggcatttgaaccactagtggtaaacagcccacaactggattgacgcccgcttcagcatatagcttttgcgtttcttcgcgtaacttctgttgtgtctcagcatctttagaagcatatttcttttgaagtgcttgaatttctggtgcaacttcttgttgtttgagcatgctcttactttgccaccaagttaatggcaagataatcacccgaatgatgatggtgaaggccacaattgcccaaccataactgccaccaaagatgtctgctaaccataaaataaagcgggaaaagttataaataacataatgatcccagaagccagtactgctactatcaactggtgatgtactacaccccgctgcgattagcatgaacaagaatagactggccactaataatagccgtttgcgattttttgaactcactgtaatccctcacttattcagaagcagaatctgcttcttcctttaatagctttgctagttttaagacgtgcattaaattctgtttggtttccgccattgttagttggttagcgccacgtcttgcgatcactaaaaagtcgacagtctgtggtaactctggcttcaactccaacaagctctggcgaatgtaacgcttaacctgattacgcatcactgcgttacccacttttttacctacggacaggcccacccgaaaatgcttttgaccaggtttttctaattgataaaccacaaaattgcggttggcaactgaatgacctgcttcaaaaaccgtttggaaatcctgttcttttttgacgcggtacgactttctcataattcactccggcatttcatttaattaattgaggataataaaaaaaaccactgaagcatcagtggcctatgcagataatacttttctgcctttagcacggcgtcttgcaagtaccttgcgaccgttcttagtattcatacgtttcatgaaaccatgaacacgttctttatggcgtttctttggttggaaagttctctttgtagtcattatactggcacctcctaattgactgtgtctattgttttcatatctgagaaacaacgggtgataaataccacctacgacattcactaaaatataatagcatatttctatagaagttaaaacactttccataaaaaaacagaataaatattcttatccacaaaaaataattcattggctttcttgtggataactgattataccgaatcgtccgatttttgtcacgcacagattacttgctgatttatccagaaaatcacagggtgttactatgttatccacaagctattttcaagctgtgcacaaattgataaaaccttttaatagcaagcatcagatacacacacttttttgtggataagtgcgataatcgtttgttgttttctgttttccacagtccccactaaaagttatccccggtcgtgtgttcaagtggataactttttaattcattcctgtggattttgttcttgttgtggaaaacttttttttagaatgctagaatgtagatagtctttctttattgaactttttttcaataaagtggttattttacgtgaggaggacacgctacatgcctgatcttcaggaactttggaactatttgcgggaagaattccaaaatgatttaacacccgtcggttttaatgcttggattaaaaccgccaaaccgcttgcttttagagccaatgaaatactgatcgaagtgccttctcctttacacaaagagtattgggaaagtaacttggccactaaggtcgttgaaggggcctacgaattcgcagagattgaattgacccctatttttctgttacctaccgaagccgagcagcttcaagctgaaaaaccagctgaagaacgcagcctcaccaaagctgaaaccccaacctttttacgtgaaacgcatttaaatagtaaatacacgttcgacacgtttgtgactgggaaaggcaatcagatggcccacgctgcagcactcgttgtttcagaagaacccggtgttttatataatccactttttttatacggtggagttggtttaggtaaaacccatttgatgcaagctatcggtcaccagctgttactctctaaacctgacacaaacgtcaagtatgtgacgagtgaagcttttgccaacgacttcatcaattcgattcaaacgaagaatcaagaaaaattccgccaagaataccgaaacgttgatttattattggtcgatgatattcaattttttgcggataaagaagggactcaggaagagtttttccataccttcaatgatctctacaatgataaaaagcaaattgtcttaacatctgatcgtttacctaatgaaattcctaagctccaagaacgcttagtttcacggtttaaatggggcttgtccgtcgacattacgccgcctgatctggaaactcgaattgctattttacggaacaaagccgacacagaacgcctcgaaatcccagaagatactttgagctacatcgctggtcaaattgattccaacgtccgtgaacttgaaggttcactggttcgggttcaagcttatgcaaccatgcaaaatgctgaaattacaactagtcttgccgccgatgcccttaaaggcttgaaactcaatgggaagtcgagtcaactttcaattgctaagattcaatccgtagtcgctaagtactacagcctttcaatcactgatttaaaagggcgcaagcgcgttaaagaaattgtgctcccacggcaaatcgctatgtacttggcccgcgaaatgaccgacagttctcttcccaaaattggacaagaatttggcggtaaagatcatacaacagttatgcacgctcatgaacgaattagccaagctttaacgagtgatcaaaatctaaaagatgccatcttagatttgaagaataccttaaaaggctaaatataggctgtggataaacgctaaagttatcctaagagttgttctcaacttatccacaagtggaaaactagacactcttttgcttttctatgttatccacaggttccacaggccctactactattacttaaaattcttttataatatatatatctattttccttcggaggtttaacatccatgaaattctcaattaaccgcaacgtgttcatcaaaacccttaatgatgttcaacgtgccatttcagctaaaacaacgattcctattttgacggggcttaaattagtgctttcgcaagaaggcttaaccttaaccggtagtgatgctgatatttcaattgaagcaacccttgctagtaatgatgaaaagaatcaattagtcgttgaagaagcaggtgccattgttttaccagcccgcttctttagtgaaatcgttaaaaaattacctgaagatcaaatgacgattgctgttggtgacaacttccaaacaaccattcgttcaggtaaatcagaatttacaattaatggcttagatgctaatagttatccacatctacctgaaattgcgggacaaaatccgttcagtatcagtactgatgtgcttaaacaattaattcatcaaaccgtcatcgctgtttctaaccaagaaagtcgcccaatcttaacgggggttcatttggttttaaaagatggcgaaatgttagccgtcgcaacggacagtcatcgacttgcacaacgaaaattaaccgtttcagtaccaagtgatgggaactacgatgtcattattcctgggaagagtttaattgaactttcaagaacgttagcagacgaagttgaaaccgttgaaattcggattgctgaaaaccaagtgctctttaaagccggtaacttagccttttattctcggttgttagaaggaaattaccctgacacagcacgtttaattccaacttcttcaagtacacaaatcgaattcaatgcaccggtcttattagctgcgattgaacgggcatcattgttgtctcatgaaagtcggaacaatgttgtccggttgacattgaatacaacggacaacacggcaatcatctacgggaactcaccggacgttgggaatgttgaagaagcccttcaatttgaaaacctaacgggcgaagatctcgaaatttcatttaacccagattatatgaaggatgctttacgttcatttggtcaaacaaccatcgtgattaactttacggcagctttacggccatttacattggtcccaagtgaagatcaagaacactacattcaattaatcacaccagttcggacattttaataatcaaaaaacgccgcatttaaaaatggggcgtttttttttgcgctaaaattaaaataaattcgtttacagcgatttcggataaaacaagtaggataaggttaaagcacttaaaaacgctcagaaagcattttagctgtgtttatttgtttttaaggcaaaaaaagtctataattgtaaggtataacagatcggtattagcgcagtaattaatatcgttaagaatggtgggttgagtatggcacaagaaattaaacttgaagctgagtttgtgacactcgggcaactccttaaagaggccggtgtgattgaaacaggtgggcaagcaaaatggtttttaaaagaaacaacggttttagtgaacggagaacctgatgatcgtcgcggccggaagttatatctggaagacgtcgttgaggtgcccgataacggccagtttgtcattaaacaacaagaaagattgtaggcgactatgtatttaagtgaactccaacttgatcattatcggaattacgagcaagtggacgtccatttctcgccagatatcaatgtcttgattggtgaaaatgcgcagggcaaaacgaacttgctagaagccatctatgtgttggctttggctcgttcgcatcggacgaataatgatcgtgaactgatacaatgggatggcgaattcgcaaagattaccggcttggtacaacggcaaactggccacacaccattagaattggtggtcagtcaaaaaggtaaaaaagcgaaggtcaatcatttagaacaggctaagttatcccaatatatcggtcaattgaatgtcgtcttgtttgcaccggaggatttgaatatcgtgaaaggctcgccagctgtccgacgacgctttatcgatatggaattcggtcaaatgagtgcgaagtacctgtataacatttcgcaatacaagtcgattttgaaacagcggaatcagtatttgaagcaactacaacgacgtcaagctaaagatttagtgtatttaggcgtattgtccgaccagttagccgcttatggcgcggaagtcacggttgctcgccgtgaatttctgcaacagatggagaagtgggcgcagaagttgcatcaagagattaccaaagagcgggaagttttgacgtttaaataccaaagtcagattccagatgagcagttggtacttgatgccgaaggtttataccaacagtttcaaaccctatacgagtcgcaccaaacacgggaagtcgaacagggcacgacattggttggcccgcaccgcgacgacgtgttatttttggttaacggtaaggacgtgcaatcgtttggctctcaaggccaacagcgcacaaccgcgttaagtgttaaattggcggaaattgacctaatgaaggaacaaaccggtgaatatcccgtcctattactggacgatgtgttgtccgagcttgacgatttacgccaaacacacttattgaaaacgttccagaataaggtgcagacgttcttaacgacaactagtcttgaaaatgtcaaaaaagaaattattagtgcgccacgggtgtttaccgtgacaaacggcaccgtgacagtggccgatgcagcagcaaattagtcaaaaaacgatcaaacggaggtttttttcttggcagatgatcaaatgaatcaagagacagaagcacaaatggaagcaaaagaagaacgcgctaaatcttatgatgccagtcaaattcaggtgttagaaggcctagaagccgttcgtaaacgaccagggatgtacattgggacaacgagttcccaagggttgcatcatttggtttgggaaattattgataatgggattgatgaagcactcgctggttttgcaacagaaatcaacgtggttgttgaacccgataatagtattacagttacagatgatgggcgtgggattccagttgggattcaagctaagactggtaagtctgcgctcgaaaccgtctttacaatcttgcatgccggtggaaaattcggcggcggcggatacaaagtatctggtgggttgcatggtgttggggcttcggtcgttaatgccttgtcaacggaattagatgcggttgttactcaaggcggtaaacgctactacatcgatttcaagcgggggaaagtgcaaacgccaatgaagatgattggtgacgcaccagcccatgaacatggtacgaaagttcattttgtccctgatgctgatatctttactgaaacaacggtgtatgatgataaaattttaacaacgcggattcgggaattggccttcttaaacaaaggcttgaagttaacgttcaccgacaaacgggctgaaacacatgaaaaacttgaattccactatgaaggtgggattaagagttacgttgaatatttagacgacaaaaaagagacccttttagacgaaccaatctatgttgaaggtgaacaaaacgggattaccgtggaagttgctttgcaatatacgaatgattatcggacgaacttgatgacctttgccaataacattcatacctacgaaggtgggactcatgaatctggctttaagacggcgctcacgcgggttattaatgactacgcaaccaagcaaaacatcttaaaagccaacgacacgaacctttctggggaagatgtgcgtgaaggcttaacagcggttgtctcggttaaacatccggatcctcaatttgaaggtcaaacgaagacgaaattaggcaatgccgacgcacggacggtgactgatcggatgttctctgatcatttcacgaagttcttgatggaaaacccatcgattgcccgccaaattgtcgacaaaggctcattggctgccaaagcccggttagctgctaaacgcgctcgtgaagtgacacggaagaagaacggtcttgaaatctcaaacttgccaggtaagttggccgataatagtagtaaagatcctgctatttcagaattattcatcgtcgaaggggattccgctgggggttcagcaaaatcaggccgttcacgtttaacgcaagccatcttgccaattcgggggaaaatcctgaatgttgaaaaagctagcatggaaaaaattttggcgaatgatgaaatccggaccttatttacagcaatgggcactggttttggccaaggattcgatgtggctaaagcccgttatcataagttgatcatcatgaccgatgccgatgtcgatggtgcgcatattcggacgttgcttttaacgttgttctaccgttacatgcgaccaatcgtcgaagcgggttacgtgtatatcgcacaaccacctttgtaccgtgttaaacaagggaagatgatgcgctatattgattctgatgaagaattacaagaagtgttagggacgctccaaccaagtcctaaacctgaagtgcaacgttacaaagggttaggggaaatggatgctagccaattatgggaaacaaccatggatcctgaaaaccggcgcatgttgcgggttaacgttgaagatgccgaagaagcggatcaaatttttgaaatgttaatgggcgatcgggttgaacctcgtcggattttcattgaagaaaatgccgtttacatggatccaaagagcatcgatgcatagcgtgttcgccgcttaaacggacacattgaaagactgactgagaggggtttatagattaatggcaaacgaaattggccaagacggtcggattgaaaacgtcaatttatctaagacaatgcgtaaatcattcctggaatatgcaatgagtgtcattgttgcgcgtgccttaccagacgttcgtgatgggttaaaacctgttcaacgtcgaattttatacggaatgaatgaattaggggtcactcccgaaaagccttacaagaaatctgccagaattgttggggatgttatggggaagtaccatccacatggtgattcagcgatttatgaagcaatggtgcggatggcacaagattttagttatcgttacatgttagtggatggtcatgggaatttcggctctgtcgatggtgatggtgctgccgcaatgcggtacaccgaagctcggatgagcaagatggctgtcgaaatgttacgtgatatcaataagaatacaattgattatgtaccgaattatgatgagtcagaacgcgaacccgctgttttaccagcccgtttcccgaacctactcgtcaacggggcgactgggattgccgttgggatgacaaccaatattccaccgcataatttagccgaagtgattagcgcattacacatcttgatggataatccagatgcgacaaccgctgatttgatggatgccttacctggccctgattttccaactggtgggttagtgatgggtaaatctggtattcgccatgcgtatgaatctggtaaagggacaatcacccttcgcgctaaagtggacgttgaggtccaaaagaacggcaaagaacggattattgtcactgaaattccatacatggttaataaggccaagttggtcgaacggattgctgaattagcccgtgacaaacggcttgaagggattaccgatttaaacgatgaatctgatcgtgatgggatgcgcatcgtaatcgatgtgcgtcgggatatgagtgcttcagttgtcttgaataacctgtacaaattgacaccattacaaacctcattctcatttaatatggtggccatcgtgaatggtgcccctaaagtcttgagtttgaaatcaatcttggaacactacttagtgcaccaagaagaagtcattcgtcggcggactgaatttgatttgaagaaggccgaagcgcgggcgcacattttagctgggttacgcattgctttagaccatatcgatgcgattattcagatcattcgtggttcgaatacaggtgatgccgctaaggtcttgttgatggatcgttatgatttatcggataaacaagcgcaagccatcttggatatgcgtttagttcgattaaccggtttggaacgtgataaagtcgaaaatgaatacaataatttgatgactttaattgctgatttgaaagatattttagccaaaccagaacgcattaagaagattatctacgatgaattgcttgaactccaaagtaaattcggtgacaaacgccggacagaattattggtgggtgaagtgcttagtcttgaagacgaagacttaatcgaagaagaagacgttgtgattgcattaacgcataacggctacattaaacgattaccagccagcgaattcaaagttcaaaatcgtggtggtcgtgggattcaagggatgggcgtccatgatgacgacttcatcgaacacttgctttcgacttcgactcatgaagtgctcttattcttcaccaatactgggaaagtttaccgtgccaaagggtatgaaattccagaatatgggcggactgctaagggaattccaatcattaacttattaggcattaattctgatgaacgcgttcagaccgtggttaatgttggtaaagaagtgcaagacgaacaatcactcttctttattacccgcttagggacggtcaaacggacatccgtttctgaattcgccaatatccgtagcaatgggttgaaagcattgaccttgcgggaagaggatgaattaagtaacgtcttgatgactgatgggcaacaaaatatctttatcgggacccataatggttatgctgtgtcatttagtgagacagctgtccgttcgatggggagaaccgctgctggtgtgcgtgggattcggttacgtgaaggcgactatgtggttggctctgacttactgattccgggtcaagaaatccttgttatctctgaaaaagggtacggcaaacggacaccggttgcagattacccaatcaagggtcgtggtgggaaagggattaagactgccaacatcactgaaaagaacggcccattagctgggattgctgccgtcactggagaagaggatattctcttaatcactgatactggcgtcttgattcgtttcaaggtcgctaacgtttcacaaactggccgggccacacttggtgtgcgtttaatccgggtggatgacgaagcgaaggtcgcaacaatggcgaaagtcgaagctgaaccagatgaacctgaaacaccagaagcaacgacggcaccaatagcaccaactgatgacactactgatactggcttagcacaagtcgatgaattactcgcgcgggctgaagccgatcaatcggcatcagatgatcaagattcagaaaattaattaaattaaaaaaataaaaatcgtttctgcgtaaatacacttgtaacaactgttaccaagcgtgttagcagcaacaatttttattttagattgtattttaacggccgttatgatagaattttatcttgtgagtatctgtgatttagacacagggtctaaatcgtgaggctaatttttattagtcagttactccttgttcttacacaggtaagaacctaaagtccataaggaggtgaacagtcatggctcaatcaaaatacgaagttacttacatcatctcaacaacacttgatgaagaaagtaaaacagctcttgtcaaccgttacgacggcatcttaaaagacaacggcgctgaagtgattgattcaaaagactggtcaaaacgtcgtttagcttatgaaatcaacaatcaacacgaaggcatttaccatatcgtaaatgttttagctgataatgatgaagctttaaacgaatttgatcgtctagctaagattgatggctcagtattacgccatatgatcgttaaacgcgaagactaattttgaattgtaattattgaatagaggggagctgacagaatgattaatcgagttgtactcgttggtcggctaacacgcgatgttgacttacgttacacttctagtggtgctgctgttgggactttctcaatcgcagtgaaccgtcaattcacgaatgccaatggtgatcgtgaagcagactttatcaactgtgtcatctggcgtaaatcagcggaaaatttcgctaatttcactaagaaaggctcactagtcggagttgatggccgtctacaaacgagaaattatgaaaaccaacaaggtcaacgtgtatacgtaaccgaagtggtcgttgataacttctcattgttagaatcacggacaacaacggagcaacggcaaggggatggcgcaagccaaaactttaacaacaatcaaagcaatggtagccaacaatctggatttaccagccctcaacaatcgggtaatccatcagctgcaaataacactcaagccgatccatttgcaaataatggtcaagcaattgatatttcagatgatgatttacctttctaaaataaactgttttggaaggaggaactttcaatggctcaacaaagaagaggcggcaaccgtcgtcgtcgtaaggttgatttcatcgctgctaaccacatcgaatatatcgactacaaagacactgatttattgaaacgttttatctcagaacgcggtaagattttacctcgtcgggtatctggtacaagtgctaaaaaccaacgtcgtttgacaattgcaatcaaacgcgcacggattatgggcttattaccattcgttacagaagactaatcagtcaaccaaaagacctgctaaacactgtttagcaggtctttttttgtgcgctttaataggggaacatgggattaaattacgggttcaaagcggtaattgtagggcaattgtgctaaaataaaagtagtattttttaagttttagtaaagaaccacatagactcaatgatagatgaacaagaatcagaatgggatctagaattaaggagtttacatgaaaaataagtttaaacaattaaaattaccacagtttttagatgatactcgcctgcggaccgttgccctgattttgttgggccttacagcggttagtttggtatttgctgcgatgttagattggctaattgctctaattttattcgtgctgctaatcgggacggtcattactgtgctatacgcgatcgaaacggtcactgagaatacagccaagtatgtctcggacttgtcgtaccgcattaagcgcggcgagcaagaggctttaattaagatgccaattgggattttattgtacaacgaatcaggtgagattcaatggacgaatccttatttacagcaatatttcggtaataaagaagttttaggcaaaaagattaagtctgtcgatccagagttggcagaattagtcgcacaaaatgaagatgctaatgaaacaaaaattgttcgttggggcgataatcaattccaaatcattatccaagaaagcattggggtggtttatcttctcgatattacacgctatgcggccattgaagatcgttatgaagatgagcaagtagccatcgggcaagtgttcttagataattatgatgaaatcactcagacaatggatgatcaatctgtttctaatctgaataactatgtcaccaacgagttatcacgctgggcgaatcaatttcagatgttcttgaagcgagttgatgatgatcatttctttgttttggcgtacgccaaatcattacacgccgctgaacaagagaagtttaagattttagatgaaattcgagaagaaacatccaaacaaaacttcccactaacgttgagtgttgggtttgcttatggggaatccgatttagccgttctagcaacaacttcacagagcaatttggatcttgccctcggtcgtggtggtgaccaagtcgttgtcaaagcgagtgaaggacaagcacgtttttatggtggtaagactaatccgatggaaaaacggacgcgggttcgtgcacggatgatttcacaagccttacaagaaatcttcaaacaagttgacgaagtctttgttatgggccatattcggccagatatggatgcattgggcgcctcatttgggattcgccggattgccgagatgaacggtaagaagtgctacgtggtcgttgaccaaaacaatattcatacagatattcaacgtcttttagaggaagttaaagcctaccctgaaattgcagtggaagtgttgtcgcctgaagaagcgctcgaaaaagcaacggccaatagtttattagtgatggtcgatcattctaaaccatccataacaatggcgcctaagttgtacgagaagcttgctcagcggacgattgtcatcgatcaccatcgtcgtggggaagagttcccagaaaacccaatgttggtttatatcgagccctacgcctcttcaacgtgtgagttagtgacggaaatgtttgagtatcaaccacaaaatgtcgctaatattaacaagttcgaagccacaacgatgttggctgggattacggttgatacgcagtcattttcaatgcgaactgggacgcgaacgtttgacgcagctagttatttacgttcagttggggctgatgcttcgatggttcaacacttgttaaaagaaaatgtcgataattatattcaaaagaatcatttaattgaaaccattgaaatggttgagccaaatatggcattatgtatgggtgaggacaaccgtacctacgatccggtcatcgcagcacaagcagcggataccttgctgtcattgtcagacattgaagcctcgtttgtcattgtgaaacgcccagatggcatgattgccatttcagcgcggagtctaggtgatgtgaatgtgcaagtgattatggagaaattaggtggcggtggtcatctttccaatgcggcaacgcagatggcagatacgactgtttccgaagccaaggcgaagttattaacggttttggcagagctatttgatccggaaacggacaaggaagcaacaaacgattaattagataaggtggtcagaacaatgaaagttattttcttagaagatgtacgcggtaaaggtaaaaaaggccaagtgaaagatgtgccagatggttacgcacaaaactttttaattaaaaatgggaaagcaaaacccgcaacatcagctgctatcagtgctttaaaaggccaacaacatgctgaagctaaaaatgcagctgctgaattagcggaagcaaaggttttaaaagccaaaattgaagacgataaaacaatcgttgaaatcaaatctaaagcgggcgaagacagccgcttatttggttcaattccaagcaagcaaattgcccaagcattggctcaacaatatcagatcaatgttgataaacggaaaattgatttaccagaaccaatcaaagcgttgggttaccggaatgttgatgtacggattcaccctgatgtaacagctacgattcgtgtgcatatcgtaaccgaataataaaatgaatgattgaaaagaccgtgattagcaccactatcacggctttttttattgctgaccaatcggtgactgttgccagtcactggtattttgagtaaactagtgagtaattgaagtcgattaaccaaaggagtaaaaatggtgaataatgaactaattgaacaagtaccgccgcagaataatgaggcggaacaggccgttttaggggccgtctttattagtggcgatgcgctcgttgaagcaatggaatacgttactgccgacgatttttatcgtaaagcccaccgtttgatcttcgagacgatggttgaattaaacgaacggggtgaaggaatcgatgcggtgactttaaagagtgccctcgatgcgcagaaccaattggaagatatcggtggtattggttatttagctgagttggctgaggctgtaccaacggcagccaacgtagtttattatgccaagattgtctctgaaaaagcaatgctgcgccgtttaatccaaaccgctcaaaatattgtggcaaagggttacgcgcaagatgaagacgtcacggatattttagataccgctgaaaaggaaatcatggatgtttccgaacggcaaaataaggccgggttcaaatcaatttcagatgtcttaacgagttcaattgaacaaattgataagttatatcaaaatgaagaagacattacgggtctatcaacgggataccgcgatttagataagattactgcgggtttgcatgaagatgaactcattattttagcggcccggcccggggtggggaaaaccgcgtttgtcttaaacattgctcagaatatcgggacgaaaaccaatgagaatattgcaatttttagtttggaaatgggtgctgaacaactcgttaaccggatgttgtgtgcagaaggaagtattgacgccaaccatctaagaaccgggcaactcgacgaacttgaatggcagaatctaatcgtagccatggggagcctttcaaaagcgaatatctatattgatgatacgcccggcgtgaaaatggcggaaattcgggcgaaatgtcggcgcttagcgaaggaaaaagggggcgttggcttaatcgtcattgattacttgcaactaattgaaggttccggccaagaaaaccggcaacaagaagtctcggcgatttcacgtcaattaaagaaattggctaaagaattacgggtaccggtcattgcgctctctcaactctctcgtggggttgaacaacgacaagataaacgcccagtcctttcagatattcgtgaatcaggatcaatcgaacaagatgctgatatcgttgctttcttatatcgtgatgattactatcgcgatgaacctagggaagatggcgatgatttcggtggtggcaatccgccagcaccagcgccacagcagtcagatgatgcggacgttggagaagttgaagtgattatcgaaaaaaaccgtgcgggtgcacgagggacagtcaaattattatttgtcaaaacgtttaataagttctcatcaatttcgtatgcggaccaatagtaatgactatttttaataaatagtgaatattatcgtaaatgaaatacttaaaaaaaccatcataattaaagtaaaaactttaattatgatggtttttttgatgggcatattaactgatattcgttaattagatgacaataatgggagggagaaatagaatgataacatcgttactttagttttatgagaatattctaaagatatttaaaagtttatttatatccaaaaatagttaatataatgcgaatctatagtgaatttcaattaatattaacattgttttccgtggctatggatggcattgttgtgttaagcactgaatgggcaactttttaccaaacacttacgcaaacaccgattacgattattgctaatgcggttgaactacctaagcaatacaaataccatagtcagtctaaacaaattatcacactggggcgcttaggcgaacgtaagggcacctacgatattctaaaattagcaggggtgattcaatcccgttttccggatattcaatttacgttgtatggtgatggtgaacaggggaaggtccagcaagaaatagaccgcctaaagttaaccaatgtgcgccttggtggctggttagctttggcggatcgcaataccgttattcaagaaagcctgttacacctattgcccacatatcaagaaggcttaccaatggcaattttagaaacgatggcttatggaattcccaatttagctacgaatgtcggggacattccacaagtaattgagaatcatgtgaacggggatttggtgacaccaggagatgacgctggcttagttcaacaactcagtgattttctaggtagtcagatgcgacgtgaaacatattcacgaaatgcccggcaaacgattaacgactgtttctcattgcaacagtattttagccgatggcaccagttttatcaaaggattatgaatgaaacggaggaggaatgatgaattctatagcgcaatcgactgataaattagagttgattaatttctatcatgagatggctcaaatttcagcaaacattagtcaagttttaaatgaagacggagttaccatcgaacaaattcgtattttacaaacattaaaacgctataaaggtattaataatagtaagattgcacaagtattaaaaacatctaccgcagcatcttcaaataaattacgtaaattagaggatcaggggtatatcagcaaacaatatggcaaacaggatgatcgtcgaattgttgatatagcagtttctcccgctggagaatcaatttatcgtcgatttgagcaggcgtgtgaaacttacattaaaagtattactgaatcagataagaaaattagcatgccagaattaatgtagctgtttgaaatgacaaatagacttgctagaagtattcggacaactgaaattgaatagacaaaaaaagtgcccacaaacggttaaatttgtaggcactttttttgatttatttttgttcagcatgttttgctgcaattaatgaacgatagttgaatagtaagtttaagatgacagcgctgagactgccgactactaagccgttgcctagaattgtgcgaacactcgttggtagtgattggagcaaggttggatgaattgctacccctaagcctaaggcgattgaaacggcagcgactagtaagttgcggttatcatcaagatcgactttgtgtaacatcttaatgccttgaatcccaacagtgccgaacataacgaccatcgcgccccctaaaacagcgcttggaataatggttgcaacggccccaatcttaggtaataatcctaagatgattaagaagaatgctgagtagtaaactggttttttcgttttgataccggataattgaacaatcccaacattttgtgagaacgttgagtaagggaaggtgttgaacaatccccctaagatagcggcaatcccttcagcgcggaagccccgcttaagatcattgctagtaatgtcgcgcccaacgatttcaccaagggcgaagaagacaccgattgattcaatcatggtcgttaacgcagccaatgacattgaaacaattgatgaccattcaaaacgaggtgttccgaagtagaataattcaggtaatttgaaccaacttgcttgacctactggatctaaggacacaatcccaatcgcagctgcgattaaggtcccagcaataatcccaattaaaatggcgatttgttggatgaagccacgcccccagatactaaaaatcaggattagggcaatcgttgaaaaaccggtaattaagtttggtgtactcccaaacgacttagcagcaacatcgccaccgcctaagttttggaaagcaacgggaatcaatgtgaatccgattaatgtaatgagagaccctgtgacaactggtgggaagagccaacgcaaacgtgcaaacaagccagaaactaacaagatgaaaattccggcgccaataatactaccgtacataacgtcaattccgagttggctgttagtgccgatggcggctaacgggccaacgtactcaacagcacaacctaggacaaccggtaatgcaatcccggtcagtggggttcgttttaattgtaatagggtcgcaaccccgcacatgaaaatatcgactgaaacgaggtaagtcatttgagcggtattaaaatgtaatgcagccccgacaagtaatggaattaaaacatcgccagaatacattgctagaagatgttgtaagccgagaatcgctgctttaatgtggggaagcttttcatttggattaattggctgtgctgaatttgagtgtatatctgccacgagtgtccctccaagataatcgttaaaatttagttaacatttagtttagcacacgccaatagtgacttcaattagaaattaagtaaaaaacgaatataacattcttaaataatcgcgatagttcgcctttgtgatgatgcacaccaactgttcgatgacaaaagtgctttcttactgaatgattcgcttgaaaaaggcgataattgttcttaaattaccgattattatgtttcacatgaaacgataatctgaaaactgggaagaatcttgtttttttagggtaagtacgttaaactaaaaggtatatgtgaaacaataatgttccacgaattaaacgcctactttaaagcatagttaaggagaaataatgacaccagcgggttttgcagcgacgttaaaaacatacaatattcaagtttcacaagcacaaatggatcagtttgaattgtatttcaaacggcttgtacaagtgaaccaacaagttaatttgacagccattacagaacaagaagcagtttatctcaagcacttcttcgattctgtcacaccaactttgtatcttgaaaaactacgcactgaaccccttacgatctgcgatattggtgcgggcgcgggttttccatcgttaccaatcaaaattttattcccgcaattgaagattacgattgttgattcattaaacaagcggattcacttcttagaagaattggtccgtgaattaggcttgtctgatgtgacattggtccatgatcgagcagaactgttcagcaacccgaagagtccatatcgtgaacagtttgatattgtgactgcccgggccgttgcttcattaaatgtactggtagaattctgtttaccaactgttaaagttggtgggcagtttatcgcattaaaagcgagtcaaggtgaaacggaattggcagaagccaactatgcaatcgaaacacttggtggccaatttgcacaagacattgctttgacgctaccagaaacagatgatcaacgacatctaatcgtaattgataaggttgtaccgacacctgccaagtatccacggcgggctggtgtgccagttaaaaaaccgttaatggctaaggaggaaaaataatggcactctcattttttaataagaaaaaagacgataaaagtattaatcaagtgatcaaagtgccggtttcagcaattgtgcctaaccggttccaaccacgaaaagtatttaatgcggacaatatcgccgaattagcaagcacaatcgaacaacacggcttattgcaaccgattatcttacgtgaatatgaagatcaaaaatatgaaattattgcgggtgaacgccgttttagagcgattcaaaccctcaaatgggctgaattaccagcgattgttcaaactatggatgatcacgaaacagcttcaatggccttgattgaaaacttacaacgcgaagaattaaccgccgttgaagaagcacaagcttataaggacttaatgaagctgaacgacttcacacaagccagcttggcagaaaagatgggtaagagccaatcttttgttgctaataagttgcggctattgaaactctcacaacccgttcaagaagccatcatgaatcatgaaatttctgaacgacacggtcggagccttttacggttggatgaattcaagcaacaaatgattttacaccaaatcttggctgaacaattaacggttaaggatacggaagcgctggttaacaagacgttgaatcctgaaccagaatcaactgaagagacagttgatgcaaccgatgacagtttaaaagaagctaccacgaaggcaaaaaaagcgaacgataaagcaaaaaaagcaattgcccatgatacacgcattgccgtcaacaccatcaaaaagtcggttcaaatggttgaacaaagcgggattgccgtcaaagccaccgaagaagaacaagatgatgtttatcggattacgatcgaaattccaaagcaataagggaggctcattatggcacacgttatttcaattgcaaatcaaaaaggtggcgttggtaaaacaacgaccacgattaatctaggcgcttgtttggcggatgctggcaatcacgtgttaatcattgattcagatgcacaagggaatgcgacaagcgggattggggttcaaaaatcccaagtcgaaaaagatatctatgatgtgttggtcgatgaattcccactaaaagaaacaattattaaaacatcacataagaacttagacattgttccagctacgattcaacttgcaggggcagagatcgagctaacatcacagatggcgcgtgaaatgcgcttgaagttagggttagaaccagtcttagccgattatgattacgttttgattgactgtccaccttcattagggcaactttcaatcaatgcctttacggcaagtaattcaatcatgattccagttcaaagtgaatattatgccttagaaggattgagccaattgttaaacaccgttcgtttggtgcaaaaacattttaacccaaacttagcgattgaaggcgtgttgttgacgatgtatgatgcgcggacgaatttaggggctcaagtgattgaagaagtgcgtaagtattttggtgatcgggtttacgacacgattgtgccacggaatacgcgcttagcagaagcacctagtcatggcgtatcaatcattgattatgatccaaaatcacggggcgctgaagtttaccaaaatttggcaaaggaagtgttagcagctcatggcaactagaaatggaaaaggattgggccgcggtttggatgctgtattttcagcgttcgaaggccctaataaaaaccgggcggatgaattagttgaagagattgcacttgatgatattcgtccaaatccctatcaaccgcggaagacatttgatgaagcggctttggctgaattagcagcgtcaattaagaagtcgggcgttttccaaccaatcattgttcgcaaaagtattaatggttacgaattaattgcgggtgaacgccgattccgtgcgtctaagttagctggtaaaacagcgataccagccatcacgcggcagtttgatgaatccgcaatgatggaaattgcggtcttggaaaacctgcaacgtgaagatttaacgccgttagaagaagcccaagcttacgatacactcttgaaaaagttaaacctgactcaagctgaagtatcagaacggttgggcaagagccgcccatacattgccaattacttgcgcttattgggtttacccaatgacgtgaagacgttattacaaaatggtgacctttcaatgggacaggcgcggacgttattatcattgaagaaaaaaagtcagattagtgcattagcgaaacgcacgattgatgaaggcttaacggtgcgacaactagagcagttaattaaccagatgaaccagattaaagctgcgaaagtgacgaagaccaagattaaatcaccctatattcaagcgagtgaaaatcaattggtcgataaatttgacaccaaggtcaatattgcgattaacagcaagggtcgcggaaagattgagattgattacagcacagtcgatgatttaaaccggattcttgcattgctagatgtgaatatcgattaaagtgaggagtcgagctagatgtatacattaggcgatcttgttcagatgaaaaaacaacatgcctgtggcaccaatcgctttgaagtggtgcgcttggggatggatattcgaattaagtgcatggggtgcggccacgccgtcttattaccgcgccgtgaattcgaaaagaaacttaagaagaatttggtgcctgcagcacaagtcgttgttgcggatgaaccccactatcaagagatgcaacaaggtcccaaccaaactaatttttaaagtaaaggaaagtgtaaaaaactatgtcattaaccgcaggaattgtaggattacccaacgtcggaaaatcaacgttatttaacgccatcacgaaagcaggcgccgaaatggcgaactacccatttgccacaatcgaccctaacgtcggcatggttgaagtccctgacaagcgtttagaccggattcaagaaattatcccggctaaaaagatcgtgccaacgacttttgaatttacggatattgctgggatcgttaaaggggctagcaaaggtgaagggcttgggaacaagttcttggagaatattcgtcaagtcgatgcgattgtgcatgttgtgcgcgcctttgacgacgataatattacctctgttaccggaactgttgacccgttagacgacatcgatacaattaaccttgaattgagcttagctgatttagaaagtgttacgaagcgttatgcgcgtgttgaaaagattgcgcggacgaaagacaaagacgccttagccgaattcgaagtgcttaaaaagattaagcctgttcttgaagaaggcggctcagtacgttcaatcgaatttaatgaagatgaagcgaagttagttaaaggcttcttcttattaacatcaaaaccggttttatatgttgcaaatattgctgaagatgccatggctgatcctgatagtgtggattatgttaaacaaattcaagcgtccgcagctaaagaaggcgccgaagtaattgccatctcagcaagaactgaagaagaaatcgcctcattagatgatgccgataaggctgaatttttggaagccgaaggggtgactgaatcagggttggataaattgattcgtgcttcatatcatctactaggcttagcaacattctttaccgctggtggaaaagaaacccgggcatggactttccgtcaaggcatgaaggccccacaaaccgccggtgtcattcattccgactttgaacgcggatttatccgggcagaaacagtttcttttgctgatttagatcaatacggttcaatgcaagctgttaaagaagctggccgtttacgtttagaaggtaaagaatacatggtcgaagatggcgacatcatcgaatttagatttaacgtttaatgataattgaggaggaagacaattggctaagaacgaacaaccagtagtaaccccagaaccagttgatattgaagggttagaagcaaaactcagtaagaaaaatgcggactatttatttaagttcaaacgcgcattaaatgccgaacaagtgccagcagaacgccaaactgaaatcttggcagaaatgttaccagaaatggtagcagaacaacataagggcaagcctgcaacacaagtatatggtccagtgacaaccaagattgatcaattgttgcacgcgccaaaacgtcctaagcaaacatcacttcaactccaaatgcttgataacggcttaatctttttaattatgtacctagcctttaacggaattgcggcttatttctcaacgaaggggtcagcaaccagcattgggattacatcaattgtcattacggctgcgcttgcggggatcatcatgacttatccaatgcgctatacgcaaatgccaaaagaacaacggccaccattttggaagatggcattggttgtaatcggcttaacactagcctttgttgcggcatacggtgtgacaatcttgattccaagtttcttgaatccagtcttgccaccacttgttcaaatcgtaattgcagcactcttaatcggcgtgcggatttatatcaaacgccgttttaagattacaggttcattcttcggttaatattacccgggaaataaatggcaattgaggaggatttgagatgattagcactgaagaacggcaaattggggcagtcagtacgttgattgtggccccaagtggtcaagaaaaagcggtattaccaactgtctttgtatatcatggttggacgcaccgtaaagagtcagaattaatggtcgcccactttttagccaaggctggttttcgcgtggtcttaccagatgcgaagtatcatggtaaacgacatggtagtcagctcttttctgagttaatgtttgaattttgggatattgtgatgcagtcggtcaccgagtttggtgaactggttgcaacactgagtgctgaaggcttagttgatcctgaacggattggtgttacagggacttcgatgggtggcattacaaccgatgcgattctcacccgatatccgaatgtcaaaattggcgttgataagattggcgcaccaatgcctgtcgcacttgctaaatggcaggttagtcaattaccaacggccttacaaaccaagtatcaagatgcgattgaagataccttagcacggttagcggcgtatgacttatcaatgcacgttgatcacttggcaggtcgtccattgcatttctatcatggaactgctgatacgatggtgccatatcaattcacggcagattttatgaccgaaattcaggcgcaaccaagttcagccaccgcattagtgacattgacgacggaagaaaatgggcaacataaagtatcagacgatgcccagctcaaaaccgttgaactgatgcaacagtacctactttaaaaatgagaaaagccgccagaacgtaaattgttctggcggcttttttgatggggacacaaaaaaaccagccttggggagactggtttctagcagatccgaagatctaaaaaggagtaaggggtacacgtattactttgggggaataatacgtgcgtggtagattgcgtctaccttaattttactttggaggagtaaaatgaaaaagttaagtagtatgaaatagaaaagattcgcttttctatactcaatactataatgggaatttgtgaagattttgtgaccagaggtttatagatttatgaaaaaagcaataaggaaagtttaagggtcaaagagtatgctaaaatgaaggtactttataagagatcgagagatgattgatatgacaaaggggaccgttttatttgatttggatagaacgatagccgattcgcaagaaggcatcgtgaacgccttggaatatatgattgaggagttatcattgccgacgcaaaccaaagctgaactggtcacattcattgggccacccctcaatgaaacaattatgcgtgagtttggtttaaatgcagctgctactcaagaagctattaaagtctttcaagcctattatgcgcctaaagggttgtatgaaaatcaactttatcctggcatgcgagaaaccctagcggcattgcaagcacaggatttacaactggcaattgcgacttcgaaaccagaaccattcgctaagaaggtcattgatcatttagagttaagtgattactttagcggtgtttttggagcaagtgttgatgagacaacgcgggtcaaaaaagcggatgtcattacttacgcattatcagaacttggtctagcaccacaaaccgcaccattactgatggtgggtgatcgccaaaatgatatcttgggcgctaagcaaaacgcgatgaatgcagttggtgttagttatgggtttggcacaatcgcggaactcaaaaaggcgggtgctgtccaaattgtccaacaacccagcgagttaatcacatcattaccggctaatcttaaattttaggcatgctgttgcgcgttagcgaccattaaggtataaatccgcgcgacatctttcgcattgccacggagctcataatcggcgataaacggtgcatcgaattggaccgcataccgtttagcagttaagcaatattgttcgttgaagttgcggttcccgctaccgattactccataacaaaggcgtgcgttctgcgcataatcgatgtattcgcctaagctattggtcattaattctttaacgccattatcaatgccgttgccaccatctaagtaagttggaacgaacgcgtaaaacggttcggtctccgctttaaagggggtcgcatccgaaatttctgtgagggtaatggttggtaacgctgggttattagcatgttgttgcgctgcataatcctgtaaatccgttacaaatgaacgtgtattaccagcaattgaaatatagagaatcgttaaattttttaacattgaatggcctcctgtgactgataagttcactttagcatttaatgattaagaatcctagtcttgaagtttaatagggttcgtgaatagaaagggtgtttaatcaatggaaccaattagtcgtttgaatcaaaatcaaccaagcgtgcgaccacatcgaggtttaagtcgctttttgacgttcttaatctttctttgcgttttccttggcattggtggcatgattctcagcctgacagttttgagagaatcatttacgcaagaacagctcagtgaaccgaagacgttagctgcgatgactgataaaattaacgttgttttattagatgcggcacaaaaaaatgggctaccaactgaagtacaagtcaaattactgactcaatctgatgtgcaggccgatttaaagaaaactgttcataatatttatacaggacaagaaaagccgttacccacagcacaaatgatgggacagcttgcaactcatttagaagcagttgtgcctgaaaatgcgttgacggaatctttaattaaaacggcagtggttgcggttcaaccaccactacaagaatacctcacgaaccaaattgaagcaccttacttagcaccactagcgactgagatgttgtttgttagaaatgtgatcaatatcttaacttgggttgcaattattatgggaattgttcttgtactagttcaatggggactaagtggtcaattccggtatgtattagggagtgttggtgcaagttttgcttggagtggcttattcttggcattaggggcggctgcgtttaaatatagtggcattgttgaacaaattgctcaaaaagcgggcgattttaatcaaacaattaccgactatgggttggctgttctggattatggtttgaagacaagcacgattgttttaattggcggggcgattgtctggttggttgcaacgcttctccaaagagtacgacattaaaaaagatgacctttgcgggtcatcttttttaatagggcgtaatcacgatttcatggttcaagtagttagccatgtagatttgttgaagactgtagccttgctgttgaatgtcggcgaggagccattcttcagtttgatcgattaattcaagtgcttctgaattaatctggccgtccataatcagcggatatttaatcgtggcgtcgcctttttgcgtaatggttaattgtccgttttgttccaagattgcgcgactgaccgtgcgaatatcgctaatcccggcaattcggagtttaaacgatagatcctgtgcggataaactattcttagaggccgtttgaatatcaatgtggccgttggtgataattgtttgtggattaccaattacccagcgtttaatccagcgattgtgagtggttagaaacttcattgtgaagacgattaaggtccagatgagtaaaacgagtaagaattgtaagagcgagatatcggcattataaatcataccgccaacaatccccccaagaacgtaattttggagttgatcaatcccactgctaggggctaaattccccttgccagagaggttgatttgtaacactaaacagaagaaaccgaaaattaatttaatggtaatatcgaaataagatggcatagtaaactccttaatcttgataggtgatgtcttggctaatcaactgagctttttggagttgataactagtaaaattgttatcaaatatgacttggtagttttgatgaccgacgcgcactaccatgttttgctgaagcgaagtcgtgttgactgcgacggttttaaggctagctttctgcgcagtcgccacacttctaatgaattgcgccatctgagcttgttgcgagtgggcggtgttaagctgttgaatccgtgtatattgaatgccggcgagtaaaatcccaactaagccgaagatgattagtaagtcacggtacttcgaatctgaacggtggcggagatattgaacgaagaagatgatgattaaactggcgatgatcactgacagacttagtttgagatagaattcgaaatcattctgattgctaaagtatgaataccgataaaaaagcataatgacctccttaaataaacggttaagcctattgtagcacactggctgagcagatagattgtgtcaaatttaaaacggcggtagactggaagcatgaaagggatgattgatatggcattaaaaataacacctgcagcagttgcgaaaatcaaggataagatgacaccgggtcaaaaaattttattggacttagatgacggtgttggtccattttcaaacgttggttattgctcgttggatacgaactttagattgctattagtaccagcggatgctgacattaaagattatccagatgaatttgaatcaaatctaggggctgtttactacaaagattatgcagctggctactttgatgaacatgaagtattagacgttaacgaaaagaatcaaatgttaaccttgagtaataacagtggcttaattgatgggcacatctccattgtcgtatttgagaatgaatcaatgactcattaataactgtggcgtcgggcagaaagtggtccggcgttttttgttgttcatttgtactttatccacattggtgggataatgacaaaaacagttttattgaggagcctgacatgaaaacagcaattgtgactgatagtgcggcgtatttagatccacaagttgccgccgaccataatattactgtggtaccaatcaccgttatttttggacaacaaacttatttggaaaatatcgatatcacgagtgaagcattttacgataaaatgcgcactactgaaaaattaccaacgacttcgcaaattacaatgggtcagatgcaacaggtttttgatcaattgataaaagcgggctacgatgaagtgatttgtatccatctttcaagtggcattacgagctttgtcaataacctaaccgcctacgcacagtcggttgaaggcatcgaagtgtatccttttgattccaagattacgagtgccggtgaagggttcttggccttggaagcggcgcggttagttgcccaaggtgaacatgccgcaactatcatgccgaaattggtagctttacgagcaacgatgggcgtttatttcgttgtggatgatttaagccacctcttgcgaacgggccggatttcgaatagtgcggcctttgtcgggaatcttttgcggattaaaccgattttaagttttaacgatgccggccaaattgttgccttaacgaaggaacggaccaagaaacgggcctttcaaaaagtattagcggatttcaaagcagcagtcgaatctgttgactatcccgtacgcgttagcgtgattgacggtaataatccagaagaaagtgtgcagtgggtcgcaacgttgacggaaacattcccagggatgccgattgaaacgagtcacattggtcctgtggtcggcgtgcacaccggcgaaaaagtaatggggctcatctggagtcgtgattatttagcataacgaaattaaaaaacagccttgcgcatttgcgcaaggctgtttttgtttaaatgtgtgctattagccatctccttgtggttaatcctcaggagatggctgatagcacactctttttttaattggtttcaataattgtattgttggctgtattattttgtggttcgctggagacttcaaaccagtcgatgtaaccgcgattgaattcgaccacttttaatgtgaattgattgatatgaatgaccgcactttgttgtaagtcggtgaagttttctaagacataaccggccagggtcacgctatctgaggcttcgaaggcatcaattttagtcttgaagaaacgttcgaaatcatagagcgtcgttttcccactaacacggtaacggttatcgtcttctttgatgatgtattcatctgaaacatcgtcaatttcgtccttgacggtcccgaatagttcttcatagatatctttatcagtgacaatcccactcgtcccaccgtactcgtcaacgacgaccacaattggggtttgcttattgatcatttgattcaacaaactgtgaataggggttgcttctggaacggagataatcgaacgcagtaatttgctgacgcggattgaatcgtcgacttgtgcctgacggactaaatcatatgcgtagacgtaaccaagaatcttgtctttatcattttcagcaaccactgggaagcggctaaagccttgttgtaagtagtcttttaagacgtctttaacggtatcggtgatatcgacgacgtagagacttgtgcgatcaaccatcacatctttggcaatccggtcattaaagtcaaaggcccgttgcatgtaaactaaatcgttgcgatctaattcaccaccagtgacggcatttttagagagactaatgatttccgcttgggaaagcacatcactaccttcttcagcaggtgaaaagccgattaatttcacaacacccgttgcggaaatgttgagtaaccaaacaaatggatagaagataatatgacagtaatggaggggcttagcaacagccatcaacatctgcattggaatatcaatactaatattcttcggcacgatttccgtgaaaaccacttctaaataggttaagactaacacgccggcaactgcgccgatgatgtgtaagccaccatttgaaatcaggtgagtgagaccgagcagatcgactagaatggtttcgacggttgattcaccaatccaccctaaaataatcccggcaacactgacccccacttgggtggttgagagatattcgtttaagttttgcgtcattttaagcgcaagattcaattttttaggattaccatttcctgaatggatggcatcttctaaggcacttggccgtgtttggacgagcgcaaattcagcggccacgaagaaggcggctaaaaagaaggtgaccaacataacaaatagattagtgaataactcaccacttgacaaaataattccccatttcttaactaactagttctattttaccattctcaagcttaaaacggtaaataacgtcgggctttagtccgattttatcggattcaataataatgaaaataccataatttagggaagaggtaaactaaattgttaaatatctaaactaaaatacgctttgtcacattttgacgttgatctgtatcgaaaaaagccactgtgttagtggcttttaaacagttttagaatgttgcagtatcaggatcttgcgcgtgtccaacgacgccgtcaagtgcatcaattgcagccatgtcttcatcggctaattcgaagtcgaaaacttgggcattttgttggatgtattcagcatgcacagacttaggtaatggtaagaagccgtgttgtaatgaccaccgtagtgcaatttgtggaattgagcgttggtatttgtccgctaattcttgcatttctggcacactgaaaatcttcccagtcccaagtgggctataagcttctaataacatgccatgttcacgtgagtattgggcagtttcaggttctaattcgccaggggctaagaagagttggttgaccattggttgtaccgttgcagtctttttgagcgcttctaaatggcgaacacggaagttgctgaccccgatggcccggactttaccagctttgtagagcatctccattgcacgccatgtttcggcgttggctgtttcccaatcatcacggtaggcaattgggttgggccagtggattaagagcaaatcaacgtagtcggtttgtaatttcttgagtgattcttcaaaagagctgattgttaaatcataagtgtgattactattccagattttggtggttaggaataaatcggaacgatcaacgccactagcttggatggcctcaccaacactcccttcattaccgtaagcttgggcggtatcaatgtggcgataacctgccttgagcgcctcttcaacagcagctacggctgtttgaccgtctggtgtttgccaagtcccgaagccaattttaggaatttgcacgccgtttgtgagcgtgtatgaactcgttaagttagacatattaaaacactcctttatcagtttaaaatctctacttacagtttacttgttttcgatagagatagacagaaaaccgacttattccccgggaaataaaatcgatttgtcataagctgagcaatttggcctgaagtgcgggatcaacagcatagaggtaaaggccgtttctagcgcggctcattagaacgtagaggctattaagaataatttgctgtttcgcggcttcaggatcagccggctgtgctgcgccggcaaatgcggcttggtcctcgtaatattcaggatgaataactagccgctcactttgtggatcatacgtgacggatggcccgatgatgacgccggcatagttgagatcaaagccttgaatggtgtacacggatccgacttcatctatactatcttcacgttctgcccaataggttttagcggttggctgataccgatcccagcgtaatttgaatgtcgatgtctcaacgaagtgatcgtgaccatcattgagtgttgctggaaaatcgtaagtagctagcatgcgtgcaagcccactcgtttggtttttaaagcgaatcgtttgatagagctcattggcatcggtgaatattttgaattcaaagtgtggatcatgtggcagggcagcgacttgttgttgatgaaaggtttgcacccaattttcaacacttggatgggcttgcatccgaaattgatgggttagttgcgcggtctgatggggagcagcttcaattcgttggcggagttgttgctgttgccagaagctcttcactttaagcacttgctgttcatcaaaaatcagaatggtgatccgactgtgtcggcgaatttcatcgagttgatttgtttgattgaagtggctataggggtcggatttggttaacagtaggtgtgcctcatcaacgaggacgatatcggcaagttggtggtttttagccgcttgattgatgaatgtcgttgggcgttgaaaatcttttttcaataaaacgggggccgttgttgtgccacttttgtagagttttagcatttctggatgattgaccaatagaacgttttgactgccatagagtggcgaggtgggtgtttggcgcgcaagtgtctgcagtaccttgaagacactgctgagaatcacgctcttaccagtcccggccgcaccttgaatcaagaaggtggcgtgttcggcgtgcgcttttgccaaacaaaattgaatgacttgttcttgtagtgcttgttgttccgttgttagttggttggcgggacgattgagtttataaagcgcgctattttgacgctgtgcatttggcaaagtgaggactcctgttcattcatttcaataaaaaaagccccagtagatgtagaaataacatcgcctggggcagtcgtgctaatcgacaaaaattagttggaattcatgttgcactaaatcgagattgacggagacgtggcggttgagatcggccacaattttacgcgctaatgttacccgttcttcgaagcttgtggcaagtgccgcgaattcagtttgtttaaagttgtagttttcagtgataaaaatcgcgtctgtgacatataacaggttattttcatcgtgacgagaaccgctctttaaaacggcatcgatataatggtaaagctgagtaggggcaaagttcaatggttggtctaaaacggttgtaatctgaaaatcaggtaaatcgtcaaccatttgtgtgtttagtgtgacttgggttaatgcttgatacagtttcatagtgacaccttcctaatgttgagatttaaggtcgtgcttgtggagcttctaagtggcgttgaataaagcctaacgtcacatcagcgataatggccatcagggcggttggcagggcaccagctaagattaaggcgccgccattagtggcgttggtcccgcgaataatgatgtcgcctaaaccgccggcaccaacaaacgcgccaatcgctgtaatcccgatggcgaccactaaggcattgcgaatccccgccataatgacggccaatgataagggaagttcaaccatccgtaacagttgccaatttgtcatgcccatcccgattccggaatcgataatattatcggaaacattctccataccggtgtaagtatttttgataatcgggagcaaggagtataaaaagacagtcgcaatgacggttcgtgtgccaagccccaagccaagcataatgattgagagcattgcgagtgaaggcactgtttggatgacattcgctaccccaattataacattactgagctttttccggtgcgcaataaaaatccccaagggaatgccaatcaacgcggcaagtaaaacgccataaatcgaaatcaaaaaatgatgactaaactgccgtaaaacataactgccattatgctggaaataatagacaagttgttgccaagtatttaaattagtcatttagcggctcctttccggaaataattatgttcctgaagaaattgttttgcgactactgcgggttctagtagatcattatcaactttaaagttgagggtttgcatggtgtcgaggtcgattttgccatctagacggtgtaaaaggggcgctagtgctggctgttctttgagaatctgatcagtggcgaccacgctcgcatcgtatggtgggaagaagcggcgatcgtcttttaagacttttaagtcataacttttaatccgtccatcggttgagtaacctaaaacgacgtccattttaccagccgccagtgcgctgtaaaccagtccgatttgcatgggcgcaactttcttgaaatcatagccatacgtttctttaaatgcgggatagccatcgccttcgtgatttacccagacggaatcgacaccagctgttagttgatccgccacttttccgagatcactgacggtttctaaatgatatttcttggcggtttcctgggtgaccataaaggcataggtgtccgcaaacccgtaggaagggaaccatgtttggttgtaacgatctttgaaagcttttttaacgattttttgggctttttcaggatctttagtaggtttcatttttaaagtaccagtaagttcagttccagcgtagcgactagcagctatgtcggcgtcaccacgaattagtgattcatgcgttaccgttgaagaacccagattattaattaaagtgaccttattttgtgtttcgtgggtaatcaactcgctcagaatattggcgagaatttgtgactcagtggtgcttgaagagctaatgcgaattgtttgtgattgacggtttccgatgccaagtgactgacagccacttaacaggaggagactgccaactaataatccgcaactcgtaatgaatcggcgtattttatgcataggagcctccttatctgattgcagcgggggtcagttgtttttccaaccggcccaagccaaaatcgactagcaatgctaacaatgtgacgggaattgtcccgccgatgattaaatccggtttgaaaagattcaacccgttgaaaatcaagtcgccaagaccaccagcgccaatatatgaagcaagggttgcccaagcaatcacgtaaaccgcagataggcgaattcctgccataatcacgggggtcgccattgggatttccacttgcataattgattgtaccggcgtcatgcccattcctttagcactatcttttagaatcggatcgacatcgttcatgccgatgtaggtgttccgcaaaatagggagtagtgagtagataaataaggcgatgattgctggtactttgccaatcccaaagagcggaatcattaaagccaatagtgccaatgaggggacggtctggagcatgctggcaatggcaatcactactttggcagttttaggaaatcgggtgagggcaattccaaggggcaccgcaactattatgcccagaactaaggcgattgcggaaatgtagagttgttcccaagttttaatcagtaaatcagagccatgttctgttaaaaaagtgagcatcatcgattcctccctttctattgttggtcggattctgcttcagattcgtcagtatcaccccagacagcatcataaacgacatcgactagggctgtccgggtgacaatcccaacaagttgatgatcatcgttgataacgggaacgtatttccagccccgtttaagaatccgttcaatggtatcccggaccaaatcattttcgttcacgtaactaatcttggtagacataatgtcaccaacactagttgcgtctttgtaatgatggtcgatattttcaatatcgacgagtccctttaaatgttggttttcgtcgacaaccagtaaggtatcaacgcggcgttggcgcattaagcgaatcgcatcaactaatgatttacctggtgtgatagcgactggacttttaagcatgatttggccaacagtttcgacatttggtttggcttcgatcaaacgatcgtgaccgattaagtcttcgacgaattggttggcaggatttcgcaagatttcattgggcgttcccatttggatgatttggccgttatccatgatggcaatgcgtgacgctaatttgagtgcttcatccatgtcatgggtgacaaagacgattgttttaccgagttctgattgaagttgttttactaagtcttgaagtgcctcacgcgtaattggatcgagagcaccaaatggttcgtccatcaaaataatatcttgtccagctgcaagtgcgcgaatcaccccaattcgctgttgttgtccacctgataattggcttgggtaacggtctaaaaagtccgcaggcatttccactaattttagtaattcgagcacctttgcatggcgtttttctggggaccattttaagagtttagggacaattgtgatgttatcttgaatagtcatgtgtggcattaagccaatattttgaatgacgtaaccaatttttcgccgcaatttaacggggtctacattagcgagattttcaccatctaaggtaatcgttcctttggttgggttaatcatgcgattaatcatccgcatggttgttgttttcccagaaccagacgtcccaatcaaacaaatgaattcgcctttgtcgacagtaaaactgatgtcatcaacggctttgttatcaccgcgatagagctttgaaacgtgatcaaacgttagataatgtgtcataaggaacctcctattgtgatgattggaaatttattgctatataataactatgttagatacgtaacatgcaactgtcaatgaatacgctttactgataggtatcaaaaagccggtgtaacggaattgagaacgttacaccggccattaattaacctgttgatttaggacgataaagaataaagtgggcgattaaagcgagacattgataagctagcgctaagagacaaacggcgacccagccaccgaagctccaagcgagggcgccaaagaatgaaccggaagcaccacccatgaaataggcaaacatgaagacggtattgttgcgactactagtggcttcaccaagcatttggacccgggtttgattggcaacctgaccgcactggtttccgacatctaataaaacaatcccgagcattagaatcggcatgaaatgcccccagagtaagaataaaagataactgatggtcatcatgaataagccagtggcgataataaagcgaggtgatttagcatcggctaagcgaccgataattggtgcagctaaagcaccagccgcaccaaggattgctaatagaccaacggtaccactaccgagacgataggcgggactggccatatagaaaatgagtgtcgaccagaaaatactaagtgtcccaaacatgaaaaaaccgttgatggcggcttcccgtaacagccgctggtgcgcgataagccctggaattgaactgattgtctgccagtagcttggcccgttttttggacgggaatccttaggtaatttgagggctgccagaaggattaaaagcgcaatcgcaattgtagcgatgagatacacccaacgccaatgaatgtaactactaataatgccgctaaagcttcgggataggagcacacccattagaagaccactgagaatggtgccgagcactgcgccccgtttttgtggttgagcgaggacggctgcatatggaatgatgatttgaggaaccactgaggtgaggccaatcatcaaaccagtcaaggcaaagaaaatgaaattgggtgctaggtaagcggctaataaggatagtaaggataagccaagcatccgtaatatgagctggtaacggctcatcacatcaccaaacgggacaatcagcaacaagccaagtgcataaccgacctgtgtcaacattgcaacagtcccgaccgcaccacttgtaacgtggaaagtggtcgctacgagtgcttgaatcggttggatgtaatatagattggagacggcaacgccggtaataaaagccatcaaaaggattaatggctgcgtaaggactgttttttgcggagcactttctgacatactagggtggacctacctctctgaataacgttcttttagaatttgaagtgcattgtcgaattcaacttgggcttccggttcttcttcacgctttgcggctgtttctagaaagtctaaaatttcaggcgtgacatcgcgcactaattgactgagcgcccaagcagcagtgccgcgaatgacagggcgcggatcagtatcgatgagttcgagtaacttcggaatcgcggtgcggtctttcacgttggcgagtgcgataatcgcattgcgttgaagtggctttttgccacgccacgaaccagcaaggtgtccaaattgaagtttgaactgcttgttactgatggttagcacgggctgtaattcgggcatcacagattctggatctggctccatatcaggatggaagtggaagtcttttcctttattaaacggacatacttgttggcaaatatcacagccgtaaatgacactgcgaatttttggtctgaattcttcgggcatgaaccctttggtttgtgtttgataggataagcaacgcttggcattgaggcggccatcgcccattaatgcctgtggtggacagtaatcgatgcagcgcgtacagctgccacattgattggccatcggtgtgtctggttcaaatgggatgttggtaatgatttcaccaagatagacataagaaccgaattcgggtgtaattaataaaccattcaaaccgatgaagcccaacccagcacgttgcgcaacagccacatcgctcagttcgcctgtatcaaccattggcttaaaagtaatttcagtatctgaatcagcaagtgtttcgatagcgctgatcagctggtccatcttatcgcgcagaatatcgtggtagtcaatcccccacgaagcgcgggcaaaactaccgcgtttagcaccagttcgcgctggcttattgatgatttttgttggataggcaagagcaatcgcgataatcgatttaggttggtcgaaaattaaatctggataaaggcgttcttcaagcactttatgttcgaatccagtcgaatgaccatttgctttttgttccttaagacttgcttctaaataatcaaaaggcgctgccgatgtgaaaccaatcttatcgatgccgatggttttgctcgcctcaatcacttgttcttttaaagtgggcattcaaagccacgctccttttttaagtttcatgtgaaacaaatgggttatgctaaataaattttgcgcaggtcagctaagtcgtgttggcttaactggagatcgtgtgataaatagtcttgcaacgaaccattttcggattcaatcgcttgtttggcggtatcgaggtaatcttgatgaaccgttagtaatgactgataacttttgaacacagactggttctgtgttttttgttgtagttttgcaagcgattgggtcacgaaagcggcagaagcttgattcgttaataagtaatctgtgcgaatcgtttcttctggaacaccgagtgcactcaacaagaaaacagcgcccatcccagtacgatctttaccagccgtgcagtgaaacagtaaggattggtcctccttatcgtttgctagcaacaagtcgaaaaattgccggtaagcttgcttggagtgatcttggttaattaagtcgacatagacttgaatcatatgttcatgaccactttttggatcagcactgaacgttttaaaaagatcagcttctgatgccgtactagccgtttcatcaattttgaaaacgggtaaggattcatagattgcattggcagggaccttgtctggtgacttggcagtttcttcaggtgagcgaaaatcaacatcatagcgcacgccataatcagttaaataagctaaatcatgtggtgttaggtgggctagactagcggaacgtaagactttatgccatttaagggtccggccgtcttttgtttgatagccgcccaattctctaaagttatggcctttttcaagtggcaaaatgcggtgtgtcatatgcgtcaactccttatccaatgataccaatattgtagcatatttaatgggcaatcaacttaacttgtcagtatgtggggagaaacagtatgataggggtattaagagtggagtgagcagatgattacgtattttgaaatgacacctgagggccagttggttgaaggaacctctgaaaaaagtgccgactggattcattttgaagcaccaactaaacatgagatgcaccatttcgctaaaaaataccacttaccagcggtgttatttgaggtggcccaagatatcaatgaagtcgcacggtatgaaacatttacaacggacaccggtgaagtattgacccatatttgtttactggtaccagttaaaacccatgattcagaagatcatgcggaatatattacgcggcctttttcgttaatcattagtggccagacgttattaactgtggggcatcaacagtccgagctcatcgatgaaatactcacgttagaaggcctggatggtcaaattgaaacggttgctctaaagagtgtttcggccatctatcaacgttatttagcggctttagcggtcgttgcgcaacagattgaacaattggaagaaaatgtacatgtttcgacacgcaatcggttgttgtatgcactcaagtctcttaaaaagagtgttgtctatttggatttagggcttaagagtaaccagcaaattattccgcaaattaaggcaagtccattatttgagcgcgtgtcaggacatacagacttactgtatcggattgacttgcagtttgccaagtccgataaggcgattacaacgtatcgtgagttattggcacagttaagtgatttgctttcagatattatttcaaaccgattgaataatattatgaagacactaacatcactctcaattattctaacggttccgacaacgttaggtggtttctgggggatgaacgtaccggtcccgctagccgagagtaagttagggtttctcgtgctattaggattgtcattagccattagcctttgtgtcggttggtggttaaaaaagaaagactacttctaattaaatgttcgcggaagcgcttcgcttttttgcttgaattgtttttccaagcggtatattcttaaagtgtaacaggtgcatatagagaaagtgagatgaacaacatggttcaagaatataaaagaatactcgtcccagttgacggctctgaagaagctgaattagcactaaataaagcagtgtgggttgctaagatgaatcaggcgcgcttggatattttgaacgttttggataccaagcaatttgcagggagttatagtggcatgctttcaggagacgctattttccaaatctctgaagatgcacagaattatctcaacagtttaaaatatgatatccaaaccaatgacggtttaaaagatgtcgagattcatgtgcggtttggtaatcctaagaatgttatcgcacgcgacttcccgacagaatatcaaaccgatttaatcatgatgggctctactggcttgaatgcagttgaacggatgttgatgggttctgtgacagaatatgttaaccgcacagctatctgtgacgtgttaatcgtcaagactgatgttgaaaatcgcccttatcaaaaagcaagtaagaaaaaataaataacaatcccaaaggctaaaaaggatgaattctttttagcctttttgcgtagttcaatttaggaggtggtaataatgacaaaagctgattggatgtatgattcacctgaattattggcgtattaccaaacagagtggggaaaaccggaacatgatgaccaacgcttatttgaactattatgtatggagttgtatcaggctggcttgagttggcggactgtattaaataagcgtgctgcctttcggacagcatttaaagactatgaaattgccaaagtagcacagatgacaccaaccgaaattgagcagttactgaccaatccggcaattatccgcaatcgtgctaagttgaatgcaacggtcaataatgcacaagccgtccttgcgttacaaaagagtgcaggaagctttgatcagtatctatggggctttgttgatggacagccaattgtaaatcggccccgaacttgggcggatgtccccgcaaaatcagagctatcgatccaaatcagcaaggatttaaaacggcggggctttcaatttgtcggaccagtcgtcatctattcattcttacaaggagctggcgtaattgatgatcatctgatgtcacagtaactttttggtgcagtcagtcgcgctaatattgcggatggtgtattatggagggatagaattcatttagattaattaaaggagtcccacatatgacacaggataatgttcgccaattagcagattggttagaagaaaacatggcagcaattgccgatcgcaaagtgcaattaaatccagaaacaatttttgctgttttggatgattttggcgttttaaataacccggtcgttaagtattttgatattacagaagaaacatattatcaatcagagtcagatcataaattaacgttatcagatgaccacaaattattaatcgatgtgaccgatcggattatggtgacccacgtggatggtgttttagctgaaaacaaagtcaactttgaatacagccacgaagctgtttatgaagatcaatatctcgttaaacgcgatttagaagtgttgacatatggtttggctgtcattggtgcagtggctgcaaccgttaaacataacttaatccaagctgatttgtctaaagatgctgtgttgagtttagctttggctgcgcaaaacatcgctaattggcaagcaaaataatccagtaaaggttggcaagttaaatgggagcagtgctagaattgcgtgatttttcgcaaaaatatcagcggcgacaactttttaaacgtctcaatttacggattgatcggcaagcttgtatcgcgattactgggcaaaacggcgcggggaaaaccacgttgcttaacgtactagcaggattgacgaatattgaacgcgggacactggagattgcaccgaagatgcggattggctatatggctgaacaactcgcaccaaatggactgacacctaagacttatttgcggatgctaggagaattagatcagtttagcaatcgaaatttagaaggtcagattaatgaattagcctatgaatttgggttagcggcggcacttaatacaccgttaaatcaattgtcacgcggtagtctgcaaaaagtgaactttgtgcaggcgattttgcggaccccagatattttattgctagatgaaccgttggctggtcaagatggaacgacccagatgcggatgattcattggttgaaagactaccgccaaaaagggggcgccatcattgtcggcactaacaacgcttttttaatcgaacagttggctactgaaatttatgaactagatgcgatgcggctattgccgattgaagaattaccgcagccggaagaaaaggtgatgcggttagaatttgcaactacaccgcgatcactcgcacttcccgctactttacaacagttagctttaaaaattgttgatggtacgcggtacgtcgtcttgtatgcaaatatcaaaaatagtgatgaattaattcaagcaatgttaaaaagtggctttagcctaagggggttacgttatgaagtcctttagtgcacagttacgtttgcatcagaaaatggtttttgataatgggaatttgtgggggcctttgctattttggatagtggccttattagtcaattatgcggtgcaaccacaagatttcgtcggcagcctcgctacattattaatgacactgtttatcttattgacgtggttgacctacagttacatcaatcaatttccccttcaaatggaaaaacttttaattttaaaattaaagaagcaatgccgtttttatctcagtttaattagctatctcatcttgttgggattattctttgtcctaattgggatgggaagcttggcaattacttacgtgctcaatgggcaccacgcttttggtcgaggacttagctggtgggattggctaggcgggaccttaatgttgacgagtattttacctgtttcagtaatgaccggtttgttctggcaacggcgaattttagtgaatcgccggatggccggtacgttgaccatcttgatggtggttctcggcagtttaggtgaagcgattgtcaattactggcatccctacctctatattctggggattttgccacccgtttcgaccatggcgcaactcttcaacacgttgggacacatttcgctagttgatattttattatcatgggcaatgagtcttggttatagcttggtcttattattgattgatcaattaattttaagaaggcgtaaattcctattttaagaagctgacaggctgctataagcggtttgacagcttctttttaagttgaattaagcggttacgggtgaaaaaatcttaaaaatgtggcatgattaaaaagaattcaaatcataaaaggagcttttataatctatgacaaaaattgcaatcgctggctcaggcgcaatgggcagtcgttttggttacatgttacaatcagctggaaatgatgttgtgttacttgataattgggcagaacacgttcaagcaatcaataccaatggcctgacggttgtagaagcggggcacgaacccgttcaggttcgaattccggctgctttgccaacggatattaaagaagttcaagacgtcattattttattcacaaaatcgatgcagctagtcgacatgttacaagccatcaaacccttaatcggtgctaagacaaaagtagtctgtttattgaacggtctcgggcatcccgaaacgattgaacaatacctgcccaaagaaaatatttttgtcggcattacactttggacggcggggttaacgggaccaggtgcgattacattaacaggctctgggaatgtcgaattacaaaatgttgatccagatggcaaagaatcggcacaagcattagttgccttgttgagtgcggctggcttaaatgcgcaatatagttcagatgtactcttttcaatctggcgtaaagcctgcgttaatgggacactgaacagcttgtgtgccttgttagactgtaatattgcacaattgggccaaaccccacaagcgcaacaactcttgcgttcaattgtggcggaattctcagcggttgctgcaacagaagccgttgaattagacattcccacgacgattgcccacatcagcaagatgtttgcaccagaacaagcaggtggtcattatccttcaatgcaccaggatttagtgcaacatcaccgcttaaccgaagtggattacttaaatggttacgtggcacgcaaaggcgccgaaaagcacattgcgaccccagtcaaccaattaatcacgggattaattcatgccaaagaagcattattgattaaataaacgaggagtcttaactaatgacagaaaaacgccaattaaatatcgaagttgaatcaatgcactatcaaaaattattaattgctatcgatgatgatgacacaacctcatccaaacgggcctttaactatgcttgtacgcttgctaaggcctatcaaattccattagggattgtcagcattttggaaaccggcgatttgaacatttatcaatcactctcaccaaacgtggttgaagggcgccgagaagaaatcgcagccgatctagatgtttatgttcaaaaagcgaaagaattcggggttgaagatgtgacgccgattttaaatgaaggtaatccaggacacgtgattgttgaagaagtgattcctagtttccaaccagacttggtcatctgtggttcaaagacgaaaccatctaaacatttaatcgggacacatgcgagctatttagcgaaatacgcgccatgttcagtcacagttgtacggtaaattaagtatttggagatcagacgaatgatagaatgtacacaatgccatattaaatatgggcgtaaattgcaccaatgtcccaattgcggtctagtgcaccaatcaacgcaaacaaaacagcaaacatcgctcctgcaacaatactatcaatttttagcgcggagtttaaaacaaccgctaaaggtgcaatggcagtgggccaacctgtggtttggcttagtcacgtttggtctggttatattaatgaatactgcaacggcaagtttgctcattgccagttggtcagaacaaattggtgcggttgctggggtgatggcgtcacaaattgtcttgcgccaacggctaaacttattaccgcttgatatgaaggcactcggtggacaactatttattctggtggttgttttgggaatcggatttttactcaagcgttacttattgaagaagacgacaaccaccttgcgcgcgtatctaacggagattagtgcgtacagtgggataaccgttattttagcattagctgcgctgttggctgctctatgtttcgggatgaccgccatctggttcgtcttaatcatggttgcagtgatgtacgtcagtttgaacattgcggttgggattagtttatttcaaactcgatgggcagcttttgatcgcgtctatgctattttattatttgaaatcttaacccatgttgtcttggcaattggcattagccaaatcgtgattttaaacctactaacaggactctaaaaaataaaagtgcgtattttggtacactttttcaaaagaggtttatcattagagttgtaaaaaagaaatgggaggtttttaatatggcagcagctgttgaaaaaacattggttttagatatgaagatgtcagaagcatttgattggagtgacgataacacaatcgtccgtgatgctttgtgggatcactatatggaagccaacggccggaacacggataaaaccgttgaggcaatgaaaccctatcttaagatgagcgacgcggaagttagagaaaaggcagaagcgcttttaaaataaggcaataaaaaaagacccgctaatcattgttgattagcgggtcttttttgggtaatcctcaaagccaacccgttcgactcagcactctaaacgtgcttcctgtcgcagtaatttccgcttaatctaaaaataacataaatcctaaaacctggatttatgttatttttgaattaatgctcaatgactaagcgcgacagtcagcactctaatcatacatatattctcttgtcattgggaggtctcttgcgctggggccttttgatacgaggtattgaatgacatcaatgttcccagattcaaacgatgaggcacatgcttggagatagagatcccacatgcggacgaattctggacctgcttttggtaaaatgacgtctttttgggcgttaaaattagcagtccagatttccagcgttttttgataatggcgccggaggggttccatgtcggcaatttgtagtccggcattgataatgtgttgtgtattttcaactaaaccgggtacatagccacctgggaaaatatacttattaatccaggcattgcgcgcaccgccttgttgacgggtaatcccatgaaggagggcaaccccatcatcagtgaggtagtcagcgatatcttggaagtaggcaccaagattttcttcaccaacgtgttcaaacatcccaacactggtaatgtaatcgaatggggcgtgtttgagttcgcgatagtcaacaagttggacgctagcaacatcgctaaggccctcgtcattaatccgttgttgaacgaaatcatattgttcctgactcaaggtaatcccgaccactttgagatgatattctttagcggcggttaacatgagggtgccccaaccacagccgatgtcgagcaatgttcggttaggttgtggattgagcttgcgtaaaatatggtgcactttattaatttgtgctgtctctaaatcatcagttggtttttcaaaataagcacatgagtaagtcattgttttatccaaccaaagttggtagaagtcattccctaaatcgtaatgactttggatatcttttttacttgccttttctgaatgcgattgttttggaatcagatgaatgtagcgactattacgcatgaaactgtctgcgctagtgtaagccgccgttaatagtttttgaagtggggtatctgttgtattacttgtcacttcaaggtcgccagccatgtacgcttcgccgagggctaatgatgcgttgctggacaattgtttgatgggaatcgcttttttaaaagtaatcgctacttcaggctctccagaaccataggtttcggagctgccgtcccaatagttgacggtaacagggaaatcaaaagagtgttgtagtagtttcttataaaaagttttttctaacataccgaaaatcctttctaggtgtaaatttgaagtaccagagtagtatacgactatttttaaaaagatgtaagttgcaactatcggaattccagaatatccaattagttcgaagtgttgtaaaataatgatatagaattgccataggaggaaattgcgtgagtttatatcaaaaatttgtgacgaatcagcagttaagacgagttgtagtgctcttaacgttgattggggtcatctatgtgtcacgctcgatgatgaatatcattttgctgacgttcatctttacttttttagtgactcaattagtacgaaaggtccaacagtattcaaaaattccgcccgcagctgtggttgtgccgctttatatgttggtgatttttttagtgtatctagcagtaacgatttatgtgccacagattgctaaacagtcaattaaattaggcgagagtgtctataatttctaccaaagtccatcatttgatgcgaatcaatttatgcgaaccattggggattacatgaaacagttcaacttgacggatcagttgaaacacggtgtatcaacaatcgttaattacatcaccggaatcggaacaatgggcgtcacaattgtcttatcgtttattttgagtttcttttacacaattgagctagaccgattaccgcagtttggaaaactctttttgaagagtacttacggctggttcttccaagatatcatgtattttgctaaaaaattcgtgaatacctttggcgtggtaattgaagcccaaatcttcattgcaattgtgaatacagtgttaacaacgattacgttaacggtaatgaaaatgcctaatattccgagtttagccatcatgattttcctattgtcgatggtaccggtcgcaggagtcatcgtttcatgtatcccattgtgcattatcgccttttcagtcggcggaattcagtatgtggtttatatattggtgatgattttagtcattcatgccctagaagcatatgttttgaatccgcgatttatgtcgagtaaaacacagctgccaattttctttacatttgttgttttatttgtagcagaacgtttcttaggaacttgggggttaattgttggattaccaatctttacgttctttttagatgtactaggtgtgaagaccattcaaaaatcgggaaaaaaacaaaaaaaagcggctaattgacgcggttagaatccgcaacaagggtggccaattggttaaggtcgatttgcaattcgacagcaacaataaataatgcttttagtgatggggcagcgcctttttcccaccggaagatcattgagctactaatcttggtattatattttgcgctgagtagatcggcgagctgttgcattgttagattcttagcagttcgcttatcgtgtaataattgtccgaacatttagcaccgtcctttatcacgcgtttgacttataagtttaattatatgacaaatgacgtcaataagtgaacacttgggactaaagtttttaattgacagagttcttacattatcgtaatattcctaatgtggaacgggattgataacgtttcttgggggtgctgaatgtggcagaaaaattatttgttctatcaggttatttaaagggtcatgatttgaaacagcaagttgttgctgatgtattgggcaaaacattaacgacggctaatcgtaagattagagggaagattccatttaccgtcaaagaaattcaattactacatgaccgcttgggaattccaatcgacgtgtttttttaagaatagttcctaatcaggaactaagtaatcagttttaaatgaaccaaataaaaataaccctgtcgactgaaaatcgtcgacagggttatttttattggctattttgctttaaggagttctaatttaccttgaacaatcatttcgcaaagatcaggataactgataccaagcacttctgcttcttgtggaattaatgaaagtggcgtcatcccaggtaatgtatttccttcgatcacgtgtaagccattttcaggactccagaagaagtcgatgcgggcgtagttcgttaagccaagtgcttgcatagcatcaagtgccatttgtttcatggcttcgtgcacatcatcaggtaaatcgtttggtggtgtgacaaattgagtggtatttccagtcacgaatttgtgctcaaagtcataccaaccgtcattaacgacgatttcaatggcaggtaatggttgaccattaatcacgccaagtgagaattcgcgacctttaatgaattcttcgattaaagcctcgcggtcgaaacgaagtgcatcttcgacagctggttgtaactcagcttcgttgtgcacgatatgcgtcccaacacttgagccaccgttacttggttttaccacgacagggtactcaaatgggatttctggcatgggttggtcgcgataagcagcgacaaaccgagcagttggaatttggttatataataagatttcctttgaaacctttttactcattgtaatacctgctgcgagtgtgtcactaccggtataaggaattccaaagagatcgagaaccgcttggactttaccgtcttcgccatcgccaccatgaagtgcgaggaagacaatatcagcagttttacaaatctctaagacattcgggccaaagagttgtgttgaaccatcagtacgtaatgcgttgatggcgtcgtctgttaaaacttcgtcgctgatgtcgtaatctttttcaacaggtgttgaagaataaagatcatcgattgatgcgacgtcgtgcaaatcatttcctaagaaaagatcaacgaaagcaacgtcatggcctttcgtttgtaatgcattggtaattttgtgtccagacgttaatgaaacgttacgttcggtactacgcccgcccgctaagacaacaattttcatatgaacctacctccgaatatttttggaaccttaagtatagcacaaaaccatattaggcgggtatcaaaaagctgaaaaatcagtggtctagtttaaaaattggcactcaacaacgtcgagtgctaattacttgcatttcataattaacggactagaatagagttgtaaagattaagaaaggaagttttagagatggcaaacgaattaatgaatggtcgtcaaaattggctagataattttggtggagatgattggttcaagaatttcggtcagcaattattggcaatatcgcctgaaacggacaacttactcaaaacagatgttaaagagaccgataaggattaccaattagcggttgatttaccaggactggacaagaaagatattcacgtggattatcaagataatacattgaagattagtgctaaacgtgatagtttcgctgatcatagtgacagtcaaggcaatatcgttcaaagcgaacggcattatgggcgctttagccggcaattctacctacctggtgtcaaccgggatcaaatcgatgcgcaatatcaagatggcgtcttacaattgatgctaccgaagttaagtgaatcagaccaaccaacgaacccaattgaaattcgttaattaaaaaagcggcaccaaccataaaatggttggtgccgctttttgagttatagaaaaagagaggcgtaaaacaatatgagacctgctacaagagtacaacatttaaatttggtgagtaaggcaatccgccgctgttgaatgggtgaatcgagtgggagtatgacgacttttaattcattttcaggatgcgcttgtagataagatttccaaaaagtatgctgtgcttgaaaagtcggcaacttaaggtagagaaacgcgataaaaatgaatgcactccccaaaagacggattgcaatgttcagggcatctagatagagcgctgttagacagccaccgattgataaaaagaataaaaggactaaccaagatgttaaaggaacagcttgcttgtaaaaggatgcgttgaaataagcttgtttcattgattgttgcgctttgtaagcttggtcatccgtgtcaggatattggtccaagaaattttgcttgagtgttggctttagcatattgagacgcacgataaaataagatgaactgatagctaacaggcaaccaataacagtgagaaaaaaggcttgatttggggacaaaataatacctccttcctaataataaataattgtagtatagcaaatatttttcaactattaagatttaatcagtaattttaatatttcattgagagataatgcgctttctaaatgaatacggtatagttaaggtaatgaaaagtagggggttggggacgtgctgactttatcacatttatccaaaagtttcggaacgatgctagcggtcgacgatgtttcatttacggttaagtcgggcgaaatattaggcttaattggtcaaaatggagctggaaagacaacgacctttcggatgatcttgaatttcatggcaccagatacgggaactattctctggaaaggtcgcgcgtttaccgctgcggattatgaccaacttggctatttgccagaagaacgaggattgtatccaaagatgaccgtggaacaacaaattttgtactttgcacagcttcgtgggcgcagcatcgcagacatcaaaccacagattgatgagtggttggtgcgctttggggtgaaaggtaagcggactgataaaatcaaggatctttcaaagggaaatcaacaaaaagtgcagttgattgcgactttgatccatcaaccggaactcattattcttgatgaaccctttagtggactcgatccagtgaatgcagaacttttagaagaaggtattttatggcttaaagaacaaggttcagcaatcattttttcgagtcatgatatgacgaatgttgcgcggattagtgaccggattgtgatgttgcgcgatgggcaagtggtgctcgccggtacaatcgatgaaattcggaatcagtttggccgaacgcaattattcttagaagcaccgttagcacgcgaaactttagcaaatatcaacggtgtttcacgtgtaacacagcacgggcagcggtttgaattaactttggcagacgaaacggttggtaaaacgattttcgacttagcgacacaaaatggctatatcctagagtttagtcaacaagcaccaacgctcgatgaaatctttagaatgaaagtggaggaaggccatgtttaagtttaaggtgatttttaaacaagtatttctaaagaatattaaaagcccagcgtatctaatcatgattttgatgccaattgtgatgctcgggattacgtttggtgtgagtcgcttgatggatcatagcaaagaacccgttagaattgctgttttggcgccgcaaccagcagaacagagtgaattacagcagttaaaaggtaaaacatatcaaatcgatcagcagattacgactcgggaacaagccaccaaagcgctccagaaagagcgaattgatggctatttgttgttgagtgaggaaaaaggacagacaatcagtcgctactatgaacgaaaagatagtccatcatttgatgcgagtgtcttagagaatcagttaaatcagattcatttagtagctttggcgcaacaagcaggcgttgcacctgaacagatccagaaattgatgacgccaactgtcattgcaccagtgacggttaattaccagaatggtcatgaaaagatttcccaggaaaacactaaagaagtgggccaaattatttcaattggaattacggtcttaatgttcatctttatcgtgaattatgctggaatgattgcccaagaaattgcgactgaaaaagggtcgcgaatcatggaaatcattctatcaagtgtttcgattgaaattcaatttttcgcgaagattgccgcgatattagccctattactcacccaaattactgtctatattttagttgggattgtcgggtttcagtttttgaaacagcaactaccgttagcagagttattgccgattattcgtcgtgctttggttgcgccagcaatgtggtatgcaggagtctttttaattattggggtattactctacaccgtattagctgcaatgttaggcgctgttgtgtctcgaatggatcaggtacaacaagccatttcgccattgattttactgggcacattaagttatttgggtggctttgtactggcatcacagaccgatattccattattgcgggcggtgagctatgtgccattgttttcacagattatgttacctgtgcggctggcaaacggtgatgttggcgcgttcggggctagcatgggactcttcatagccatggcgacactaattggactgacttatttagcattaattatctatcgcatgaatattctagtttattcggataaaggtgtttttaaagcattaattgccacctatcagcaactcaaagaatcgcgccagtagaagatttttacaactaattaaagcggattgatggtatgatagagccatgtgattttagtagcaaggagagcgattgaacgatgcaaaaacgatgggtaaaattcggattggcactcttaggggtgacactggtattggcaggctgtcaaagtaagccagcggacaaagaaacgttggtcaaaaagccctatgaaaaaagtgattactatctcggaacgatttgtacattgcgaatctataataaagacaaggaagccgtgctagataaggcttttgcgcggattaaaaagtccgaaaatcaagcaacgttaaccaaatcaggttccgaattggataagattaatgataacgccggtgttaaacctgtacaggttagcaaagatatgtggccactaatggaaaaagcgttacattatagtcaagaatcggatggcgcgtttgatatggccattggtgcgatcacagatttatggcaaattgggttaccaggcgcgcgggtgccagcacaagcagaaattgaccaagcgttaccattagtcgattatcatgacgttgttttgaataaggccaaacgtacagtttaccttaagaaaaaaggcatgcgacttgattttggcgggattgctaaggggtacattgccgatcaagttaaacaagtttttaagaaaaatggtgtgacatcagccgttattgatttaggtgggaatgtgattgttatggggcattcaccattagggaagaacaaaccatggacggtcggcattcaagatccgaaaaaggcgcgtggagaatcagtcggtacgattaaaggccgtgatatttcggttgttacggcagggatttatgaacattatctaaaaaaagacgggcatacttacatttatctctttgatcgccatactggctacccatatgaaaataacctagcgagtgtcacaattatctcgcctaaatcagtagatggagatgccctttcaaatgctgtctttaataaggggattgtcgaaggcatgcagctcatcaacaacaaaccgaagaatatccaagccatcatgatcacaaaagataataaaatctatctatcaaacggtttgaagaagacgtttaaacttaaccaagattcaaattatcaagttgaaaaacaattaccaacgaaatagccgctaaattgcggcttttttgcaattatgggggtcaaagcattaacggaaaaagtggcaaaatgttaaaattgggaaagaatctgcttttgaggaggacaatgatgacaaacgtgcgaatgcaagatgatttttatacggcagtgaatcaagaatggttaaaaacggctgaaattccagcggataaaccagcaacaggcggctttgtcgccttggttgatgagattgatcagcaattaatggctgattttgctaagatgtcgaccgcaaagaacgcattgttacaacattttctagattattacgaactagctgcggactttcaaacgcgggatgcactcggtatgaaaccgatcctaccaatggtagcccgggtgcaatctctcgatagtttagcaacttacaatcgtgggttagctgattgggtactttccgggttaccaacaccatttggcttatctgtcgatgctgacatgaaagacacagcccatcacgcgttgtatgcggaagctagcgacttaattttgccagataagacctattatgaagctgacaatcccaatgctgaccatttattggccgtctttacggatatgatggttcagctcttgcagaaaattgggattgcgcccgttgatgcaacgaagacggttaaattagcgttggcatttgatcggtcactggcaccttatgtgaagagtgccgaagaagcagcggattacacgaaactctataatccacagcctttgagtgattttatgcaacaacaaacgacgcttgattttccacgtttatttagcaaggtgctacctgttcaaccggaaaaaattatcgtgacggaaccgaagtattttgcgcaactgagtcagcttgtgacagacgccaatttcgaaacgttcaaagcgtggctgttagtcatgacagttcgtagttggagcggttatctgaatgaagaggcacgccaaattagttcgctctatagtcgtgcgttatctggtagcaaggaagctcgtccacaacaaaagagtgcttactaccttgccttagggatgttcaatcaagttgttggcgattattacggtcggcaatacttcggtgaagcagccaaggccgacgtccaaaagatggtccaaaaaatgattggtgtttatcaaaaacgccttgaaaaaaatgactggctaaccgaaaaaacacgccaacaagcgattgtaaaactcaaccaccttgggattcatgtcggttacccggatcagattgcccctatttttgcgaagttggtcacagtacctaaagcagaagatgggacattatttgaaaatacagctgactttattcgaacgattgaaacggaaaattttgcgaaacttactcaaccggtggatcgtaataagtgggaaatgggcgctgccacagttaatgcctattattcaccttcgaagaatatcattgtctttcccgcggctattttgcaagcacctttttacagtttagaacaaagtagcagtgctaactacggtgggattggtgcagtgattgcacatgaaatctcacatgcttttgataataacggtgcgcaattcgacgagtatggcaacatgcataattggtggcaagaatcagatttagctcacttcaagacactttcggaagaaatgattgcagaatttgatggcctagaatatgcaggcgcaacagttaacgggaaattaactgtctcggaaaacattgccgatgcgggtggcttgagttgtgcccttgaagcagccaaagaagaacctgatgttgatttggcagccttctttgtcaattgggcaacgatttggcggatgaaagctacaaagcaatatcaacaattattgttaaatattgatgttcatgcaccaaacgcgttgcgggccaatattcaggtccaaaacttggcagccttttacgagacatttaatgtaacgaaagctgatcagatgtacttagcacccgctaaacgggttgcaatttggtaaattaaaaaggtgcgccacaattgtgacgcacctattttagtagtgatgggggataaagaaatgtcagaaaaaaaacgcatgattaatggtcaaatttatcgggcgaacgattcagaattgcgagccgatatgaaacacgcgcgcgtacttactcggttgtttaatcaaaccactgaagaacaacaagattaccgacgcgaattaaccaagtctttatttgcgaaaagtggctcagatttatatattgagccaccatttagaactgattatggttgccaaacacgcattggtgagcatgtgtatatgaattacgattgcatcattattgatgtagcaccagtgacgattgggaaccacgttttctttggacctcgtgtagggctctacacagctggtcacccaacgacggcacaagaacgccgggatgatctggaatatggtaagccaatcaccatcggggatgatgtgtggattggtggcaatacggttgttaatccaggcgtgacaattgggaacaatgtggtgattggttctggatcagttgtgactaaagacattcctgataacgtgattgcagttggtaatccatgtcgggtactccggccgattgatgaggcagaagaggcctactgggcgcagcaaaaagcaagttattttgaagcccttgctaatgaataagtttaccgagtagtgttaaatggagtagtcatcactaacaaagcactaagctaaatatcagcaaactaccgagaaaaagccgctagtactctataaaaagggttctagcggcttttttaaatgtttggtggatcaaactggcagcaaatactattcagaatgggtcaaaccgtaataagggttaattacgattggttttcatcagtactgcggtgccatggcttttgtaatgcttggacggcttgagcgatatctgtggcgtgggtgattgctgagataacggcaactccatccacggtagtctttgcgacttgagcaacgttttcttggttgataccaccaatcgcaacaaccggtagttcactttgctgcgttaagaaacgcaagcgattagtgccaagtgctggtttagcatcttctttggaattggttggaaaaattggaccaatgccaatgtaatcaagtatcggttgattatgactttggtgaagttcttgttcagtgtggcaagatagaccagttattaagccgtgtgctttggccgtttcaattttatgccacgggtgatcgctttggccgacatgaataccatctgcattgatttgaagtgctaaatcgagattgttatcgataataaatgggacttgataatggcggcaaagggcttgagccgctgtcgcatactttaaaatcgcatcggaatcttgcagactaccagcacctttttcacggaattggaaacaggtaatgcctgcttgtagtgcttgttcgagaatgtttagaaaatcatccataccggtattttgggtacccgctaccaaataagtttggaacatttcccgggaaatgttagtcatgatgaacctcctgataagtccagtgattggttggtccgtggccgtgaccaacagcaatcggattagcaattgcggcttggataaaggctttgctaatatgaattgctgctttcaaaggggtgcccttagctagctcggcggttaaacaagctgaaaacgtatctccagtgccatgtgttcgtttagtagcaattcgtggtgtagttaaccattcatcttgtccatcagcgtagaggacgtaatcggcggcttgtgattgatagtctaaatggcccctttgataatgatattcttggcgcccatttgttggagttggtgggccgcttgtttgaaatcagctgttgtctttatgcggctgcccgtgagaacttcggtttcgggtaagttgggtgtcagcactgtggctagcggcaataattcagtacgtagggtatcgatggcatcgtcggcaagtagctgtgcaccgcccttggcaatcattacaggatcaagggtgagcggcccccaatcataatggcgtagattttcagcgaccgttgcaacatgttcagcatctgccaacattcccgttttgcaggcacgaattttaaagtcagtagccaatgaagcgaattgttgattgattagtgatagtggtagtggcagactgccttgaactctgtgttctggtttgatgttgctaacattaatgatatcgggaatttcttgggtggtgcgaaatcacttgcgaatggttcagctgtgattggtaagacagggatgtatcaagctggtttcttcccagtcatgatgttcggcttacctgctggggcttacgcaatctacaaaaatgctcgtccagaacgccgtaaagcaacagcttcattgatgttagctgctggttttgcgtcattctttacaggggtgacagaaccacttgaattctcattcatgtttgttgcatggccactttatgtattgcatgcagctttcacagggatttcattggctgttgctgctttcttccactggacagccggtttcgcatttagtgctggattagtcgattatgttttaagtttgaaaaacccagttgctaaccaaccgttgatgttattggttgaagggttggtcatggcagttatttactactttgggttcaactttgccatcaagaagtttaacttgatgacaccaggtcgtgaagcagaagatgctgttgatgaagatactgctggcgttgaaacagacgctactgatgataaattcatggttcaagcaaaacggatctacgctgcaatcggtggcaaagacaatatcaaagtgattgacaactgtacaacacgtcttcgattacaattagaagacactgccaatgttaaccaatcagcgattaaagctgttggtactgctgggattaacgttttagataaaacaaacattcaaattattattgggacagaagtccaatttgttgctgatgctttaaaagaactttataaccacaatacgccaatcgcaacaagtacaccagaacaagctgccgcaccagttgaagcacctgttgatagcgatattaactcaggtgaaacagatgttttctatgcagttgctaatggtgaattgatcgatattgaaaatgttgatgatccaacttttgctcaaaaaatgctcggtgatggctacgctgtcattccaacagacggcaaaattgttgtaccagttgatgggactgttatgactgtgttcccaacgaaacatgcaatcgggattaaaacaacgaacggtttagaagtcttagtgcacatgggaattgatacggttgaattaaacggcgcaccttttgcagtcgctgttgaagaaggccaaacaatcaaacatggcgacttattagcaacggttgatttgaatcaaattactgctgctggtaagaagacggcaatgatggtgatcattaccaacatgcccgctgttgattacattaagtttaacgcaatgagtaccacagttgctgcagacgcagttgccttaaaagcaacaacgaaataatgaataaataaaaagccccgcaaactgaagtttgcggggcttttttgtgttatttagttaaataatcctttgaagaaattagccatgctatcaaagagtttttgaatgaagttccgattgctttgggtgttgagcttattgaagatgtttttcgcaccactttggatattattcattaacttaccggcttgattcttgaaatcatccgaatttaaagcaccggaatcttggattttaacgagaacattaatgatttgttgtttttgattattgttgatgatgttggtgaggttgttttgttcgagttgattattgacgatggtagtaatttggttaacagtcagattattgcccttacttgccatgtcttttttggcacctgtgacggcattattcaattgggaatctgaataaccatcggtgcctttattagcctgtgtgatatcgctgagggtgctcatttcgtcttgagcagcagttacttgcgcttggttgagtgaatcgccattttcagcgaaagcggcgtaaacgccagctaaggcgccagagccatcgattggaatggcggaagtcacgtaaattgtcgcattcgtgacgccggcggttaaggccgcatttttatattggttggctgtaattgtggtgatgttgttatggccattaaaatcgataattttaacattgatgccggtattgctgtcatttttttgaattaaagcacttgagtagacacttgagttggcgttaaatgtttgttgattttgatcaagatattttacaagtgtggaaccggtcactgttagttcactgacatctgtgacattcgcggcattttccagtgtcttgagggtatcagctttttgggtgctagaaaggctagtcccaagagtggcaacgggtttgtcccacgatgtggtgctgtcggcaaaggccggttgtgcgctcagaccgataatagcagtaaatgcaatggggatgaggaacttcaatttattaaacataagcaataatcctttctcaaagcgaatgatacctttagtatagccaattcaagccgtaaagtatccgattttaactatttttaggaattaaagatgattttaaggcttttttaaggttgctgagtggggtgaatgctactaatgacccgtgtatgggttagtttctcgtagaataattgtggtcgtttagtcacccaacttaataagaagttaccggtgaataacagtggtggtaagagtgagagaccgataataaagagatagacgtcaaaatgttgttggccactagcaacagcggcatccagggtgacgcgccagagttgaaagctgggaatgacgatgaaaaataggagtagctggcgccagaagatcgcccaacggtgatgatggtcagcgacaatctgtagttgcaggagagattgaccaggtgttttgccacgccaaaaaacggggagcattaagaagtaagcaccagttgccaggcagtactgaagcatttctgaatgaatggtgggtagttttagtaatcgccagataacagcaattgcaaatgtaatgatgcctaacgcacagtaatcaacggcaagtgccaataagcgccggaagtagcccactttttgaccgcgcgcataggctgcttgatccaaactttcacgagtgggtaagaaaaaggtgaccaagggctggagataaaatccaagcagtccgccagagatgttgatcaataagtcatcaacatcaaataaccgataagggcgaggataaataccatacagtccggaaagttgcgtgagttcaaagaatagggataacgtaaaactaagtaataaggtctgtttgaaagacgttttaaagaagtaacgtaaataaatgccaaatggaacggttaaaaagatgttaaacaacggctgaatggttgccgcttgtttaagtgttgcgaggtatgaactcggttcggtccaaacgaaatgggttgagttgataaactcccggacaaacgtaaagggaactaagttatagcgaggggtggttaaatgagcgaccaccgagcgtgggggaggggaagaataattaagcagtaagcggctaccaagtagaacatgaagctgtagagaattacactacgcaggatggttagcgaaccataacgatgatagtggtaaactaacagtggaacggttaagatgattgcgacgaatgaaaaggcaattgccgcagtaatgatattgctgacgtaaaccatgatgagctcctttggtgttagatgtggttatattgtattttttaatgaacgcctgtcaaaacagggatcattgttcgttatttacgttcgtattttatcggttatatgtatcgttaagattttactgaataaaggctgattagagattttaaagttcgtcttttatattgattttgagataatttgttgctacaatagtttttgtgagttttagggtttaaatagcggatctgaagacggattcgaatagaggagtatgtttatatgacatctgtagtagttgttggaacacagtggggcgatgaaggtaaaggcaagattaccgactttttaggtcaaaatgctgatgctatcgcgcgttatcaaggtggcgacaatgcaggtcataccattcagttgggtgacacaacttaccatttacaattaattccatctgggatttttaacagtgacaaactcagcgtgattggcaacggggtcgttgtaaatccgaagaccctcgtttctgaattgaaatatttaacggatcaagggatcaacgtgagtcaattaagagtatcagatcgggcacacgttatcttgccataccattctaaattggatggcttacaagaagcagccaagggtgatcaaaagattgggacgactaatcgtgggattggcccagcttatatggataaagccgctcggagtgggattcggattgccgatttattggacaaggaactctttgcaactaaattaaaacaaaacttagacgaaaaaaatgcgctctttactaaaatctacggtgctgaaccacttgaatatgagacaatgtttgcagaatattatcaatatggtcaagaaattaaacaatatgtttgtgatacttcagttgttttgaatgatgttttggatcaaaaggggaatgtcttatttgaaggcgcacaaggcatcctcttggatatcgaccaaggtacgtatccatttgtgacatcatcaaaccctgccggcggcgtttcaacaggttcaggagttggtgcttcacggattgacgaagtggttggggtggctaaggcttatacctcacgcgttggtgatggcccattcccaactcagttagatgatgaaactggcgacttcattcgtgaagccggtcatgaatatggtactgttactggtcgcccaagacgcgttggctggttcgactcagttgtgcttcggcattcaaaacgagtggcgggtgtgacccaattatcattaaactgtgtggatgtcctaactgggattaaaacattgaagatctgtgtcgcttacgaattagatggcgaacaaatcgatcgttatccagcaagtctccgcgaattagaacgttgcacaccgatttatgaagaattacctggttgggatgaagatatcacgggtgctaagacgctagaagacttgccagctaatgcgcggcactatgttgaacgaattcaagaattagttgatttaccattagcaacatttgctgttggtccagatcgtgaacaaacaaatgtcttatctgctatctggtaggtattgctgaaaaagagtacaaaaaaagagaatgcaaagttcgttttctaaacgtgtcgttaaacacgccaacaaactttcattctcatgggtttggcaccagtcagtattatacacacattaccactaaaaagatagtgggaaaattagttggtttagaggagtcgttatggaaagagtaagtcgcttcttcgggattgaagaacaacattcaacagtgcaacgggaaatcctagcaggattcaccacatttatttcaatggtttatattttattcgttaacccgagcgttttaggtgattcagggatggataaaggggctgtttttgcagccacagcattagcaagtgcgatcgggtgtttcttgatggggttatatgctaaatacccaattgcaaccgcaccagctttagggattaatgcctttttcagttattcagtggttatcgggatgggtgtgtcatggcagacggccttagcgggtgtatttgtggcttcattaatcttcatgttggttactgtctttaagctacgggaaatcattattgatgccattccgcggaatatgaaactagcgatttcagctgggatcgggatgtttgtggctttcatcggtttacacggtggtggcttgattgttgcgaacaaatcaaccattgttggtttgggggacttctcgcaagggacgacttggttaactgttttcggcttaatcattaccgttattttaatggtccgtaaagtaccaggagcaatctttatcgggatgcttctaacctcaattgtgggagccatcagtggcctaattaagttgccaacacactttgttgcagctgcgccaagtttgaaacccactttcttagctggtttaaatcacattggcgatatcaacaccgttcaaatgtgggtcgttgtactcactttcttattagtgaccttctttgataccgccgggacattggtcggtttagctgaacaagccggcttcatgaaagataacaagatgccccgcgttgggaaagctttggtatcagattcaacggccatgttagctgggtcattactcggaacatcaccagttggggcctttgtcgaatcgtccgctgggattgctgttggtggtcgaactggtttaacggccgttgtgacgggtgtgttattcgtcttcagtttattcttctcaccattattgacggttgtcacgtcacaagtgacggcccccgcattagtgattgtcggtgttttaatggctcaatcattgaagaaaattgactgggaaaaattagaaattgcaattcctgccttcttaatcgttctaggcatgccactgacttacagtatttctgacgggattgcattgggctttatcgtctatccaatcacaatgattacagctggtcgtcgcaaagaaattcatccaattatgtatgttttattctttgttttcgtggtctttatgtacatcttaaacgtaaaataaacaacaaacgcacagccgaaagtttcggttgtgcgtttttatgtgttgctgttattaattgcgaatcacaaggatttagagccggtaaatataaaatagtgtgttacaatagtcgtaaatactagtgaagggcttaaactgttatgtaaaaaaagacaagaaaccgattaattaatggcttattagccattctgttagtggttggattagtgttggtcttcatcaatccaatccgcaaccaactggttaaaatgatggcgcatcgtcagatggacgtcacagctgctcaaattaagaaaaaccaacataaaaaagcgagctttgattttgataaggttgattcactcgatacaaaacagattgtgaatgccgctattaaaggcgatgtgattgtcttaggaaaagttgcaattccaagtgtcaagatggccttgccagtcatgaaaggcgtctcagaggacacaatggctcaaggtggaggcacaatgaaacctgatcagcaaatgggtgcagttaacaattatgctttagcagggcattctttccaaaacatctttctgccacttgaaaatgtgcgcgtcagcgataaggtctacttaacggatatggaaaaagtctacacgtacaaagttgattacaaagcttcaatcagtccatacgacgtaaaagtcatcgatgatgtaccaggtcgtaaaatggtgacactgattacctgtgataaaacggtccgcagatggtgtattcaaggtgaactcgtgaagacccaaaaggcaacaaagaaaatgttagctgttttcgggaattaacccgggaaataaaagactgccagtgagttgaaatgctttaatagcagggatgcaacagatttgttgcttgtttttgtgggggttaattcgttaaattaggtttatagcggaggtggcaaaatgtcagttgggaatgctttaaaggaagctaggatgaatgttggggtgacgcaggaacaagttgcacagaatttgtttgttacacgtcaaacggtttctagatgggagcaagataaaacattaccaaacgttcatgttttaaaaacacttagtgtgctttatggtattccaattgatttcatgtctggcattattcattattgggcttgtgctttatccagtcgctaagaagatatcaggaatggttgttagctttggtaaacaatatgttaaatataatcaaaaggctctatacgcataaacataaaaacgtcatctattggatgacgtttttatttgaaaatcattggaatgaggccacctactaagagtggttggagataaatttgaagaaactaacgcgcctaaattattcaatgaattatcagcggatgaacaagtggtactcgttaattgggtgctaacaaccttgaaaccaattaaaacttttagcagtcagcggtcatcatacgagattaaacatatttttgaacgtacaccacttggcttttatgtattaaatggtgcaatgaaaggcgcgatgttaatcgctggttatcagattaagaacgaaaaagaaataaattggacgtttaatatatccgaacgtagcatttcgcgggcctatcaacttggataagaatttccgatttagggaattttatgtaaaaaaaagagatgtgcgttgagcgtgctatatgaacgcttggccccctaatatatagggggttggttaataacctgataaaacctaggttctaagtaaaggagtggttagcaccaatgattaattttactcccaaattgcaagaacagattagccacacgataaatcctattaaatcagtattttcattaatattcatattttatggacttaacttaaccggcggaagcagcggagaaaagctctttgggtgtttgatagccagtttgccggcgcggtaaattgtttagctttgactcaactgcttggatatcatgaggacccaaaatatccatggataaacccttgggtacatcgcggcggatcattcaactacggtaaaaatcgctgcgttgaaatagtgttcttttgcttgccctagagtatactctagggactattataaacaaaaagaagccataaacaaggatcatgctacttaacggcatagcatacatgactgattaaattaaccctcattagggaataggagcataacatcatgacaaaaaacgtattagttaccggcggcaacggttatctgggtctgcacattatcttacaacttttaaatcaaggttatcacgtccgtgccaccttacgccaactcgacaaacaaaccaccgtccgcaccgccctaaaagaaaatcaggcgcaacaccgcgaaaatttaagttttgtcgccgctgatctcactcaagatgctggctgggcgacagccatgcagaacatcgactacgtgctaagtgtagcatcacccgttttttccaatgacccgaacagcgacacaactgccaccgagggtattttacgcattttaaaggccgcccaacaggcccacgtcaagcgtgttgtcatgaccgccaactttggcgccatcggcttcagtaatcacgaccaaacgagcatcaccactgaagccgattggactgatcctaacgaaaaaggcttatcggcctatgaaaaattcaaactgatcgccgaacaggctgcctggcagtttattgaacaaagtcacggcagtttagaactgactacgatcaatccggtggcgatcatgggcccagcattagacgcccacgtttctggcagcttcgatctattgaaaaatttacttaacggtcgtcccaaaatgattcccaatatcccactcaatctgatcgatgtgcgcgatgttgctgacttacacattcgtgcgctgaccgcacctcacgctggcgggcaacgttttctggctagtgctgctggtcagatatcactaccagagatagcagcactgattcgccaaaaacgaccgcaaattgcccaaaacattcccactaaaacgatgccgaacttgcttttaagcagcgctgctttgttcaaccagaccgcccgcgaaggcaatttattagtgcacgtcaatcgtcagttgagtacccaaaaagcgcaagatatcctaaaatggcagccacattttgataatacgaccatcgtattagatagcattgacacgttaattcaatatggactactgccttaaattataaatttatttttatcacccccttgacaaacacttaaaatcgcgttaaattatagaaacattataaatcaatgagaaaattaaacgctgtgataagaaaagtataattgtattcaccagttaagcgagcgtcgtttggtgcaaggacgtcaaggtgcgacaattagaaaatcatctttgagcgttcattgggggctcccattatcgagctagggtatttcgtaccaattggtgcttgtacccgaagaggctgttttcgtgagaaaatggcaaatcaaggtggtaacacgtttattaacgtccttatctgaaagtaatttttcaggtttgggcgttttttgtttatcgtgatcattcccgcgcaggatgatcgccgccattactaaagtcgacttagcaatggcaacactcatgatttaaacgtggggcaacagacgcttagtctttgaaccacatttccacaacctacaaaatttaaggagtgctgcttatgttagaggaacgtaaactcactaaacgcgattatttcgtggttagttcaatgctttttggtctattctttggtgctggtaacttgatttttccattacatttaggccagctagcgggacagaattgggtgcctgccgcgcttggcttcttagtcactggtgtgttattgccattattatccgttttagcaatcagtatcactcgttccgaaggtgtctatgatgttgggcggcctttaggtcccgtattcgcgctcttattcatgatcttgatccacggcaccatcggcccactttttggtacaccacggacagccaccgtttcctacacggttggcttagcgccactagtaccaaagaatttccaaacagttggtttattagttttctccgctgttttcttcggcttagccctctttttctcattagaggaaaataaaatcgtcaacaatatcggtaagttattaaatccagttttcttagtcttattagctggcgttttcttcttagcttttagttcaccaatgggccacgccggtgttcaacacgccaccgctgcttatacatcaggctctttcgtcaatggtttcttgcaaggttataacacgatggacgccttagctggcttagccttcggggtcaccgtagttaccgccgttcgcaccttaggcaaaaaacgcgctaacagtgtcgcgctggtcactgcccgtgccggcgtcttcgcaatggcaatgatcgccgtcatctacgttggtttgatcttcgttggcgcgatgtccttaggtaaactcaaagtttccgctaatggcggcatcgcttttgaccaaattgtcaatcattatatgggcgtcgctggtcaggccatcttagccactttgatcaccgtcacttgcttaaccacggcgatcggtttagttgcggcttttgcccaagactttcataaacattttcccaaagttagctaccgcacttggttagttctaactactctggcatcattcttgaccgctaatatcggtttaaatcaaatcatcgcttggtcaacgccaatgttgatgttcttatacccactatcaatggtcttgattttattgtcagtcgcttcaccactgttccacaaagacccagtcgtgtataaattcgttgttctctttaccgttgttcctgcttttttcgacatggtaactgcttttccagcggtcgtcagccaaagtagcttcggtaaagcgatgactggcttcgaacaggcatacttgccattcgccaactacggcttagcttggttagtccctgccttagtcggtaccgttttaggggttgccgtccacgtcttcaaacgtgttagcgcccgcaacaccgtttcacaaactaaataggtaagtcaaaaaaacgttcacttgcggtgaacgttttttattgccttgaatttatactttaagtgcaacaaaagagactcatgatatgaatccctgtaaaatggtgtttgcgaagacaaccatcgaagggagcacataatcatgagcccatacaaacatcttaccatgagtgaacgcgaaacgatattcctgatgcataataatcaggcttcactgacttcaattgcccaaacaattggtcgagcaacggcgacagttagccgtgagttatcgcgaaaatagatcggcatattcaccttctgttgctcaagagcgctacgaagctcaaaaatctcattgtggacgccggtcgctactttctgatcaccaattgcttcaattaatccggcatttattcttggatctacaatggtcaccagaagaaattgccgcacgcttaaaattagagacctcatcatttcagatcagctacaccacgatttatcgtggcatctactccggtttatttgatcagaagctttcatcacgaggtgccagaggggtgatcagaaagcttagacatcatggtaaatcgcgccataaaaaaggttatgaggaacgtcgcgggaagattcctatatcgcatacactccaagaacgacctgagtctgccaataagcggactcagattggccactgggagctggatactgtagctggcaaaactggcagatcttgtgtggtcacaatggttgaccgttgttcaagatacttaataatgcacaaagcagctaagaaaaactcagccagtgtgaccactactattcgaagactactaaaagatctgccaccagaacacttgggtacgattacgcccgaccgtggcaaggaattcgctaaacatcatcaactaactgaagaatttgggattgatatttagaggtgatatgatggtcaaaattattattacggatcaacagcaaagcaaagaatatcagttaccaagttatgggagcttaactgttacaactcaaaataataaggtggtgttcattgaacgaacagacaagactaaattagtttaatacctgattggaaaaccaaagggatgcgttactgctagtacatggcaatagtgcatccctttttaatatgttggaggtgtcagagtgtttctttttgatattgatgaggataagagcagacagcaagcagatagattattaaagcgatattggcgagtgaaacatattgcaggtagtgccagtcatttaaagagtcctatttgtgatcatgcgccaaagtcttttagcagtgataatacaaccgagaaacgggcggttaaaacactcgaggcacggcagaccctagaatacatagacgtggctttaagtaagttaacggtaattaacagggaattgctaaagatgcagtatttaagtgctggtaaattaaccatggcttatatctgcggtgaactaggtataacagcatcatcattcaagaagcataagaagcaggctttgctagagtttgccgagtcctaccctagtgaaggcttattaatattcaagaagcattgataacggggatgcagtcctgatttaggatgccatcaaaattgaattaatacttaaggagtgaagcagtatgatcattgaccgaataaaccaacaagcaagtatcaaaaacgccagaaagctgttaaagagctatggcacgattagacggctagccacggtaaatactagtcatcccttacatgagcaggctaagtgtgatttaaagtgtattcaagcggttgtaggaggaatggaggatacgcaagcatccattattaatatgtgttacttagacggtagtcataaaacaaggcaatatatagcggatacgatggggtatagcaggtctagttataatcggtttaagaatagggcgttattagcttttgccgaaagctataataatcaagagttgcttgtttataagtaggttgcgcaaaatttcgcaggctagtttatggattagtaattgaataggacaagccattattggtttatccaatgtaaacctacgtgaattagcttttgttggacataaaacctaacaaaacctaacattaatttatttagagattttagaggccctaaagaaggagtcaccgaattgatgactccttaaagatgagttagtatattacaacagcatctaatgcactgatatggtgcgtcagatacttagccaattatagaaacagtacggccgaaaattcggccctaattaactttagataccgttgattttaacgagatgttgcccaatccatctttggtttcggctaattgcatggaagcaatctgaggtaccgaaacggtagtttagaaaaaggaggccctaaaatagggcggtttgtcgaaccgtgaaataacctgccataacagatcgttctattaggtcaaaataaaatgagtacagcggaaaattccgtgctactcaattagatataaattggctcaagcttgagcagatgtgttttgatatagaaacatatggagtaacgaaacgttacccctagatattatctaggtcgaaaaatacaaccaagctaaacttgggcccgtttgaaacgtctgtccaaaactggaggcacccccttatctaatgaatacagtcgcgatttacgacggaaaccataaatttaataaaaatgaatgctaatggttgctagtatgtttttaacagtctatgtttaacttaaatcgttggctaatgaagttagtccaaattaaaaaacggccactaatctgaccgcctgcagtaagttatgtatatgccccgtgcgtgatttttgttgaatacgtgaatacggttttgaatacggtttgtcgtattcactgtgaatactaatctgctaagaagaaataaaaaagccgtcatatcaatgcctaagcacctctataacgacttatcatgtatacttgatgggtggtcaggggatcgaaccctggacccacggattaagagtccgttgctctgccagctgagctaaccacccatatgatgtctcgccttacgacttaaatatcatagcatattaaacaaacttttgtaaacagttatttgtattttttttgaataaagttactgagcgcgtaagaattaatcgttatagggattaacaatgccgttaatccagttggtaggaattgacctaattttgaattgccttctgaaaatgagtataatagaaggcaaagcatccacattcaaggaggatccgcacatggctaaaaaaatactagtcgttgatgatgaaaaaccgatctctgacattgttaaatttaatctaaccaaagagggttacgaagtctacacggcttatgatggtgaagaagccttacaacaagttgaagaggctgtcccagatttaattctattagatctgatgttaccgaagattgatgggctagaagtagcccgccaagtgcgtaaatcgcatgatatgccaattattatggtgacggctaaagattctgaaatcgataaagtgattggcctcgaactcggtgccgatgattatgtgacgaaaccattctcaaatcgagaattagtggcgcgagttaaggctaacctacgccggcaaggtacaacgagtcaatcagataaagaagcgaatgaagaaaatcacgagattaacatcggggatttaacgatccatcctgatgcttatattgtgtcaaaacggggcgacaagattgaattaacgcatcgtgaatttgaattgttacattatttagccaagcatatcggccaagtgatgacccgtgaacacttgttacaaacggtttggggatatgattacttcggtgatgtccggacagtcgatgtgacggtccgccgtttacgtgaaaaaattgaagacaaccccagccacccagaatggttagtgacacgccggggtgttggttactacttaagaaatcctgagcaggagtaaatttgccgcatgaataagaaaattcggttgctacaatcgattcattttaaaattgccattgtgttcgtattgttgctgctggtaacgttggaagttatcggcgcttcttttgtgaagcaactggaatatcagaatgtgcgtgattttaagcaatccttacaagtgacatcctatattcaaaaccaacttagtaatgagttactgaataatagtggtaatgcgaacaagaatattaaagagattattggcgatatgggcaattctgccgaaattcaagttgtcgataataagggcaccattcgaggtgtcacgaacttgaataatcaaagtaccgttggtcaaaagacgcgtaacccacgggtgaaacaggttatttactctgggcataccgaacaagaagtggcatacaatgagagtctagggagctattatacagcgatccaaccgttgacgaacccaagtggggatagtaataccgttgtgggcgccgtttatattcgggctagtatggaagatgtttacaaggggatttcgtcgattaccgtcattttcttaacctcgtctttagtcgctggtttattagggatggcattatcgattgttatttcccgggcaattacccgaccaattgatgaaatgaagaaacaagcgattcaaatggcgcgtggggattactctgggcaagttaagatttatggtcaagatgaactggggcaactcgcgattgcggtcaataacttatcagtccgggttgaagaggcgcaagaagcgtcagagtcggaacgacggcgacttgatagtgtgctcagtcatatgactgatggggtcattgcgactgatcgacgaggcaatatcacgattatcaatgaaactggccaagattttttaaatgtgacacgcgatgagttactgggccagtcattgcttaaagttttacgaatcagtgatgaatattctttgcgcgatctattagaaacgcaacaggaaatggtcttggatttctcagaacaacaagatcacgacttaatcttgcatgttgatttttcattaattcaaaaagaaaccggctatatcaccggtttagtttgtgtgctccacgacgtcaccgaacaacaaaagaatgaacaagaacagcgcgaattcgtttcgaatgtgtctcacgaattgcggacgccattaacaagcgtgcggagctatattgaagcgctgaatgatggcgcatggcaagatccagagctagcgcccaatttcttaaaggtgacccaagaagaaactgatcggatgattcgaatgatcaacgatctattgagtttgtcacgaatggatcaaggaacggcaaagatgaatctcgaatatgttaatttaaacgagttctttgggtatgcactggatcggtttgatatgatgatcaagcgggatcaagagcacaaagatgatttgcctaaactgacaaccagcacgggcaaattgccaacagatgatccgaataagaagtacagtattacacgagacttcactaagcgggatttatgggttgaaattgataccgataaatttatgcaggtgatcgataatatcatgaataatgcgattaaatattcaccagatggtggcgtgattacgtgtcgcttattggaaacacatcgtcacgtgattttaagcatctctgatcaaggattagggattccacggaaagaccttggtaagatctttgatcgcttctaccgggttgataaggcccgttctcgtaaacaaggcgggactggtttaggcttggcaatttctaaagaagtgatcgaagcgcatcgtgggcgtgtttgggttgatagccaagaaggtaaaggctcgacattctacatttcgttgccatatgaaccaattgattctgatggaggtgagtgggatgcgatttaataactttttaatgcgcgttatactgattgctgccattatcgtcagtatcgggctatcatggctaatctggaccagtaacgcgcattatgagcgccaaacggacagtcaaaccaccactaagtcaacaagtcgtaagacagaacgaaaaatcggtgatatcttcttgccgacgcaactattgtggcggacagacaatcagagtcagttgatttataactcaaaagagagtttgattccacagtttaaagcgactttaaagcttgccaagtcggcacagtttaagcaagttaagctaagcgaagacgattattaccaggcaattagtgaggatcatacattgacccttttatatcctgataatatttcgtacgctatttttaaaaaggtcttcagttatcagaataataatttaggtcaaaacgtgacattcaatcggattcgaatcacgttgggcacacagcctaagttgtggttgatgaatgatcaaagtcatcaagtgtaccaaacgacactcaatgttttttcacaagctcgtgtgaaaaaggtgcttaaaaatgccgatgtgcatttgaaagtgaccgaaaaaatgttgaatcacaagccattactctatgtggcagcggatcaaacgttgttgccttatagttatttagttaatcaacaacccgaaaattattacatcacaacgctgttgaatcaacaaaatacggataatattgatacgaaagaacaaggcaatagtgcgatttatacggatgggacggacagcaatttgtataaacgcctaacgatcaaccatgataccggtgaaatttcgtttgtgaagtatgaaaatgagaaatcaccaagcacattaacaaagagttttgaagccagttttgatgcgctttcaaagacaggtaacgccctttcagggatgcgtttctatagttatgataaagcaacgaattcgactgcttatcggacctacgttgaaggattcccagtcttttatcagactaactttgggagcgtgaaagtacaattcttaccaactggccaaaagattgatttttcaaattatagtttgcaagtacccgttcctgctgaagacaagcaagtcacattgccaagtaccgagtctgttttgaatcaattgacaagtaatggtttcttgctagaaaatgtggaaaacgtgcaagtcggttatgaatggaccaaagaaaccagtaacgaacaagtgattgatttaaatccaacctactttgtacagtataaaggggtttggcgtagcttatccgcattgatggcgcaaaaagctgaattaaccgaagggagttagatgaatggattttcgcagaattgaaatgatttttatcgccatttttattgcgctggatatctatttatttgcctcgctgaaaggcagtcagacaataacgtcgacggcgattactagtggttcacagactagccagattatgaaggatttaaaagacgatcaaatttcagtgaagaaactctccaagcgccgaacggatggttattatttagccagccgacaaaaagatcagacattattagaaacggcgagtgccaaactaaccggtcaaactgtttcgtttgataaagcgcgcatgacactgacgagtgaattggataaaccactgacttacaaaaaagggaaccaacgcttagccgtggcggcctttatgaaggaaccagacaacgtgattcaagcggaggactaccgctattcacacgcattatcgagtgatcaacaagtcgtatatgtgcaaaaagtcccaggcgggcagatcatggatgaacatggtcagttgatttttacattagaagacgggcagattagtcattacacgcaaacttacacgaataagattcaagttttgcgtgaaaaagaaagtacgaaggtgactgctcaagacgcggtcattgatttatatacagataatgagattccgaataactcacgcattatgtgggtgaaactcggatacagtgctttgttggacgccaatagtagtacggtgtacgtgccagcttggcaagtggccattgagaataagaattctaagagtgtcgtcgttaagcggattaacgcctttaccggtgcgctgatgaagaaccgtagtgaaatttagttgttttagaaagagaccaaggggatagagcaaaacatggtagaaaaagacgcaatgcaagtcagcgtgctcgcaagcagtagttctggcaacacaacgtatattgaaacacctaatcataaagtgttagtcgatgcaggaatgagtgggaaacgtgtgcaagatttaatgcatagtattggccgcgatcttaaagatgtggacagtttattagtgacccatgagcatcgcgatcatagtagtggtgtcggtgttttggcccggcgatacggaatagacgtgtacgcaaatcaaccaacatgggatgcgatggcttcgattattggtgaagtgcctgctgaacacaagcacatttttgaaatgggtagtaccttgtcagttggtgatttagatattgaaagttatggggtgtcacatgatgcggctgctgcccaattctaccaattccatcataataaccgtgcctttgcaatcctgaccgatacgggttatgtctctgatcaagtgcgtgggacaattgaaaatgcggatgcttatttagtggaatgcaaccacgatttagagatgcttcggatgggaaagtatccttggtcattgaaacaacggattctcagtgataccggccatttatcgaatgaagatggggcatccgctttgatgtcgtttatggggaaccagactaaacgcgttttcctaggccacttgagtcaagaaaataacatgaaggaactggcccatttgacggttgcgtcgatcttaaaggaacatgattatggggtgggaacagactttgaaattctagatactgatccggcagttgctgatccattgtttgccgtgtaattagactgaatagaagacattttagttgtttttgcgaaataagttcgctaaaatgcggattagaaaaacaatttaatattcgtaacttgttcataattttttcaaatttacattctatgatagagataatcaataaacagaatttattagaaagtttgggtgaattagtatgaatcagaattcaggattaatgaaaacggctgttgttgccgttattgcagcactaatcggtggtggcgttgctggttatgccggttcaaagatgggaagtaacactgtctcaagcactgcccaagtaccaactaaagcaggtgccactaaaattagtaatatcaaagtcaactcatcttcacaaacaacaactgcctttaataaggtcaacaaagcggttgtgtcagttgttaacttgcaaaaacaacaagataattcaggcgatttgagtgcgctctttggcgcggatagtaccaataaaaaaagtagtagtagtgagcttgaagaatcgagtgaaggctcaggtttaatctacgaaaagaaagatggtaaagcctacattgtcacgaacaatcacgttgtttctggctcagataagttggaagtcatccttagtgatggcacaaaaattgatgctagcttagtcggaacggatgccgtttctgatttagccgttttaaagattgatagtgccaaagtgacgaagaccgcaacgtttggtgattctgacagcattaaacctggtgaatcagtgctcgcgattggttcgcctttaggctcagaatatgctacttctgttacccaagggattatttcagcaaagaaacggacgattgatgtgacggatgaaacaaccggtcaagcgactggccaagcaaccgttattcaaactgatacagcgattaaccctgggaattcaggtggtccgctagttaaccttgcaggacaagtcatcgggatcaattcaatgaagttagcttctaacgggagcacaacggttgaagggatgggctttgccattccaagtaacgaagtggtcaaaattattaaccaattggttacaaatgggaaagttgttcgaccagcgcttgggattagcgtcatcgatttgacgaatgtttcatcaacgcaacaatcatcagtcttgaaattaccaacctctgtgaagagtggggtagttgttgcatcagtcaatgccaactcagttgctaagaaggcagggattagtaaatacgacgtcattgttggtttaggtggcaaggatgtcacaagtgttgctgatttacacacgacactttacagttacgatatgaatagtacggttgaaattcagtattatcataatggtgaattgaagaaatcaacagtgaagttgactgaagcagcatcaacagatagtacaacggcagcaaaataaattaaagccgccagcatcaattagatgttgacggcttttttattttggttaaattcagactaaagtggcaggaatgttaagttttaaaaatgtcaatgtggatagtaacctgggaagaaatccgagcgtctgtggataagtctgtggattgtgggtataacacggttaaaaggtctttttagttatccacaaaaaaattaacaggcggtggataacttttttaaaattattataacaccagaataacgctgatataaaaggatttgtaaccggataatttgagaacgaacaatcaaaaaagggtggataacttttttattaaatttaacgaaaaaatttaggtgtcggttatttagtatcaagaaaaattcgagataccatatttgggacgaacacttgtgcatatgtggacaacttttgtggataagcagtactttccggtgaattactgtgaatagctttttttctgcattgttttcccctaaaatgtaagtaacagtaggaggctatttatgaacattaaagtaatcacagttggtaaattaaaggaaaagtatttaaaagcggggatcgcggaatatgcgaaacggctcagtaagttctgtaagttcgaaatgattgaagtcgcggatgaaaaagcgcccgaatcattaagtgacgctgaaatgactaacgtcaaagacaaagaaggcgaacgaattctcaacaagattaaagataaggaacatgtgattgtcctggcgattcaaggcaaacaacgtgcctcagaagaattcgcaaaggaaattcaagatttggcgacctatggtaaatcagatatcacatttgtcatcggcgggtcactcgggactagcgatgcggttaacaaacgcgccaatgatgcactttcatttggcaagctcacactaccccaccaattgatgcgcttagtattgacagaacagatttaccgggcgtttatgattaatcaaggaagtccgtatcacaaatagagataggcataaaaggcctcattgttgaatgaggctttttatatgcaacaagagagagcagcttgcaacaaaacaaatagtcatcgaattaagcgagatcttctgctatctttaggtttgtagaggaggcgagttaatgaaaattatatttaattgggattcaaagtgtgcacaagatacgattgtcgttcacagtcaaccacagaatcaagcaacggttgaatctgcttttaagaagctaacctttgatcaatcgattcaggtgcgagatgcgcgaacagatcgattacaaaacatatcattaacggcaattgaaagttttacggcctttggacatttggcgaaggtggcgacaatcgatggcaatagctattactaccctagtaatttaaaataattagccccgttttcgcagaacggttttctgagaattaataacacaacgattttaaatctgcagcaagttgccaattttgcggtgggttcaaatgcgcgattggtggtctatacgcaatctggaagacagtatattgttagtcggtattatgccaagcaaataaaggagtggttaaaatgatgaagcaaatccgcaaagactttaatcaagtggcattaatggcgattatgtggctcactgttgtcacaacgctaacgcggggcgaagcgctggctgcttggcgattagttagcctaggcgtgttgattggcattgtgtttggcgtcatttattcatacttatggcgctattcgacgttcggtgcgccgtggaatgttttgattagtactattagtaatattgggtttcaaatactcgctttgaggctctattcgacaacgttatttgatgttgtttcaccgtatttattagggacgtcgttattaacattcgtaatgcacgtgattattttttattactacacgcgctatcaaaataagcgcttagtgaacgaattgaatcaaaatagaaaataaacttgttgtcccctttgcaggttgtttatactagaggaactaggactatttgttaagtagaaatgaggggaatcagatgacgaagagacaacggaaacgactttggctagcaagcggtgtgattttactaggattagtgattcttctaattggatggcaacaccagaccgccgtttttgctttcttggatcaatggcaaaattaccgccaatatgtgcttgagattcgtcatctggggccgtatgctttcttggtgtttggtctgttaatgattggggtcaccttaattccgggtgcgccaacatcagcggtggcattgattattggcgcgtgtttgggtcattggggtggtttcgtggtcaatgcgattggcttgacgatcgggaacttgttgcaagtccaattatttgcccgtgtcagaaatcatcgcagtaaaaagccggattcgcgtgtttaccgcgcattaattaagatgcaacatccagcgcttggtgtattaattggctatgcagtgccgatgattcctacggcctttgtcaacttggcggctggagacacccacctcaccccccgagcacagggcctggcgtgctttgggggttcaacgattgtcgcgtttatctacgcctttgcgggcgatttgcttattttgaagcaagattggaagagtttattgattctcttgatagtcgctgttgtgattggtttaacggaatatggtatccggatgcggcggagtgataaagctcgccaaaaagtcgaacagtttgacgcattaaattaaagttagaagacgtcctgaggaggacgtcttttttatttgtatgaaaatgtatatgataaggtatgatattaaaagtgattgatatactgaagtaagctcgttaaacgaaataacttatactataataaatataaaagaaaaatacatggggcacgcaatcgtgagtaagaaaaatacacttttggtaacattagcattattattatccaacacaatggcgggactcgatgggacaattatcaacacggctttgcccgctattatcagtgatttacacgggattcaatatatgggctggattgtggcggttttccttttggggatggcggttgcgacccccttatggagtaaattaggcgaacggattggaaatcgtggggcttaccagctggcgacattattatttgcggttggttcgatttttcaggcggtttcggggaatatcgtcttctttctgattgcacgaacggtgatgggcatcggtgctggcgggatgaatactttaccattcattatctatgccgacttatacaaaaatttacgcaaacgcgcgcaggtgattggttatgcgactgcgagttatagtgcggcttcaattgtaggacccctaattggtggctggattgtcgatacgtttagttggcattgggtcttttatatcaatgtaccaattgccctagtatcaattgtttgtgttcgttatttctttaaagaaacgcttaaatcacatcaaaccggaaacgtcgattatttaggtgctgggattatgattaccagtttggtgactttattgacggggattcaaatgattgggacgggttcgctagcactcgttttaggattggtatttgctggtttagctttattagttgtcttgtttagagttgaagaccgggcagttgatccgattgtgccgaaccgcttatttaaaaatccgcaattggtgaccgactttattttatttgttgttttatggggcgcatttatcgcgtttaatatctatattccaatgtgggcgcaaggtttacttggattaagtgcgctactcggtggaatgacgcagattccaggtgcggtgaccaacttaattggctcattggcgggtcccgcaattcagcctaaattgggtaaacaccgcgttgtgacattgggaacagttgcgtttttaattgcgtttagcggtatgttgatgatgggcgaccaagcatcgttttggttcttactgttgatgggggcctttgaaggtttcgggctcgggatgagttttaacgtcctacaaatcagtgttcaagaagatgccgaagaacgtgatgttcccattgcgacgtcgtttgcctatctcttgcgaattctcagtcaaacattcatgtcatcgatttacggtgtgattttaaaccatgccttaacacgcggcattgccgaatcgcacggtcaaattacgatggcgatgatgaataagttaagcaatctccaacgcgttcacgaattaccagcgcacttattaccagcgatgcgcgcgattatgtaccaaggcttgcataacatcatgctgattgcgacagtcctattggtgattgtgctcgcgtttaatatctggttacagatgaaggcgaaaaaagaaaattaaaaaaagtgttgaaggtcgtgagtaagttggccctcaacactttttttaataataatattttaaatcactcgccgggcttgggtagttatagatggtatcggtgagttccgttgcggttgtctgatgtttaatcaggttggtaaagtaattaatgagttcttcagcaattgtggtgtaagccgcagcaccgacgagttggttagtttgattgtcaaaaatggtgatgaccattgcgtcggattcttgaatacgattgaaggtataccaatttgtgacggtttgttgattaatgcggtattgactaggagcagcttgtgcagttgcaacagaaacgcctacttgtgatatttgtgggcttgcatataccgtatgtggaatgagtgggtaagtaatgggtgctgtctttttagcgagtagttggttggcgacatagcggccttcaaaaccagcaactggtgttaatttgggttggacacgatctacgacgtcaccaatggcgaagacgcggggattactactcattaaatggtcattgacttgaatgccatgctggttcgctgttaccccagctttttccaatgccagttggtcgatattgggtttgcggcccattgcggcaaaagcggcgtcgactgtcagtttaaaattagcttgattactgagagttagctgattgctggtttgcgtaattgttgtgacgtcagtgtcaaaatgaaagtgaatgcctttttcctgaagactggtgacgagtttatgtgttaaaacttcagggaagtcgcgtaaaatacgctcgttatgttgaataatatggacttctgcaccagcagtaactgcaatatttgccagttcaatggcgatatacccgccaccaataaaggcaaccttttctggtaaacgatcgaggtctaaaaattcattactggtttgtagtaaatcgtgaccctcgattgtagggagcgttggtgtttgaccggtcgcaatgatgaaatggtcggcagtgtaagtgtcaccattaatctgcaaggtttgagtatcactgaagtgggcggtgcccgtgacggtttggatgccggcatgttgtagaccgttgagggtaccagttgggatttgttgcgtataagatcgcttaaaggccatcagttcagaccagttaatagcgctagttccgactaagccatttgtttggagcgcttgttgattgtcgagtgcttcgacagctgaataaagcatttttttaggatcacagccacggttggggcaagtgccgccccataaatcattttcaacgactaagacggactgttgttcagcgagactgtaagccgccgctaagccgccaggaccgccaccaataatgattgtatcaaagtgtgtttgcatattaagacctcctcagatttcaattcgggttcatcttagcatagtcacaaagcgaatcaaaaaaattggattgggtgtttaagcacgtcaattggtgggctgattgctaagtggtacaataagttaacaaatcgttaaccggaaaaaggagtagcacatgattgaatttgaaggtgtcactaagcaatatgaacaaagcttagcattagatggcttgacgttaaccattccagacaatggtctatttgttttggtcggaccgagtggtagcggaaagacaacaacggttaaaatgattaatcggttaattgaaccaacgagtggcacaattaagattgacggccaacccatcaatcaaatggatctccaaacgttacggctcaatattggttacgttctacaaaacattgcgttgtttccacatctcacaattgaggaaaatattaccattcaattagaggtattgaaatggaccaaagctgatcgtcaaaaacgggcacgcgaacttttggaaatggtccatttagatccggatcagtatgctagccgttatccaagcgaattatcagggggacagcagcagcggattgggattattcgtgcgttagcaactagtcctaaggtgattttgatggatgaaccctttagtgcgcttgatccggtgacccgtacacaattacaagatctcgttttgagtttacaaaagcagctgcataatacaattgtatttgtgacccacgatatgaaagaagcgttgcgcttgggcgatgaaattgcggtaatgcgccaaggcagtattcagcaagtcgggacagcaaaagcgatttttaatcaaccaaaaaatgaatttgtccgcgaattttttgacattgaacgccaacaagcaacgttgacagttcaagatttattggcggccgatttaggaactgttgttaataatcagccgacaacgattacgtccagtgcaacattagctgaattagcgcaacaattagtagaccatccagatgggggcgtagttgccactgatggtcaagaacaacggcaattgacgatgaccgatttaacaacgctcattgcgaaacggggggtatgacgatgatgcaacagattgaacaaattttaacgacccaatccggtgagttgctacaagcacttgggcaacatttggagatttcgttattggcgttattaattgcggcggctatcgggattccgttggcgattgttttaacagctcatcagaaattagctgaagcaatgctgcaagtcacgagtgtcttacagacaattccgtctttggcgctcttaggattattgatcccgcttgtcggaattgggacgattccggctgtgattacgttagtactttatgccttaatgccgatttttcaaaatacatacactggtttgatcggaattgatccagcattaaaagaggcagaaatagccttcgggttgccgcgcgctaaacggctactacggattgaactgccacttgcgatgccgttgattatctcgggtttgcggattgcactcgtgatgattatcgggacagctaccttggcggccttgattggtgcgggcggcctcgggacgtttattcttgttgggattcagtcaaataataacgcactattattggttggggcgacactttcagcggttttagcgttagtggtcagtgcattaattcgctggttagggacattatcctttaaaaaaatcacagtcagtttagccatttttgttggccttttcggtgtgatcgaaggaatgacacggtttcaagcgccgcagaccaccatcacgattgctgggaaattgggtagtgaacccgaaatcttgatgaatatgtatcgtgatctaattttagaagaccagcctaactacaaagtaacggttaaacctaatttcggtgggaccacattcttatttaacgccttgaaggctgataagattgatatttatcctgaattcacaggaacggttttacagacgttggtgaagtcgccaactaagacaaaccagaatccaactaaaacgtatcaacttgcaaaaacatcgctacaagaacagttcaatatggcgtacttaccgccaatgcgctatcaaaacggttatgacttggcggttactgcggcctttgccaagaaatataatgtcaaaacaatttcggatttagccgctttgaatcaaccatttacggccggttttgatcctgatttttatcaccaaaaagatgggtatcaagggttaaaggacacctatcaattaaatttaaatgctaaaattatggagccaagtattcgctataaagcgattgcggacggcaaggtcgatgtggtcgatggttatacaaccgatgcggaagtcgcacggtacaaactagttgttttagaagatgatcgtcacttcttcccgccttatcaaggggcaccgattatgaaagccggctttgccaaggcgcatccggaagtcgtcaaagcattgaatcgcttggcaggtcagattactgagagccaaatgcaagagatgaactaccaagtacaggtcaaacaccgcaaagcacgcgatgtggcccatgattacttggttaaacagaaattaatcaggcactaacgaacaatgcttgaccttcacgtcacgtcaggccttatagtgggttttgaaggagggaaggcaaatggattatcagattaaaactttcgctgaattgaccggggtttctgagcgtacgctacgttattatcacgagcgcggtttactggtgccaacggttgctagtaatggttatcgaacgtattcgagccaggatgcagatcgactgcagttaatcttaatgtaccgtcaactacagtttagtctggctgagattcagcagctgttggcgttaccaccggccgagcgtctggaacgcttagcaaatcagcgggaacaactggttaaacaacaagctgcgctaacggcaacgttagcacagctagatgcgacccttcaaaatcaaaccggaggaattcaaatgacagatcaaactaaattcaaacagtttaaacaacaggcagtggctgaaaatgagcaacgctacgggcaagaagtgacgactaactatgggaaacaagccaagcaagaagccgatcagcactttttagggctaagtgaggcccaatatgcaacgatgcaggcggctgaagaccgattgaagacggcattacaaacttacttggaccagccgcaattgccatcagaagcggcgcaaacagcctttgaagcccatcaaacgtggttacaaacagcgactccccggtatagtctagcaatgcaccgcggtttagcagccatgtatgtagcagatgaacgatttacagcatactacactaagttaattggagatcaacgcgtagcggaggctttacaaacgattattgaatattatgcaattgaagcctaaaaaaggactgacatttgtcagtcctttttgattatttagcgggaattttccgtaatacccgtgctggattaccaactaaaattacgttacccggataggatttggtcacgacactgccggcaccaacgacaacgttattgccgagcgtgattcctggcagaattgtgacatttgcaccgagccagacgtgattgccgatagtaatgggactagaaatttctttttttgtcgcacgttctaaggggtcaattgggtggtaaggggttaagagtgatactcctgggccaaatttacagtagtcaccaatggtgactggtgcttcgtcacaaataacgacgttacgattggcgtaaaaatgatcgccaatcgtaatgttttcaccgaagctaaattcaaaaccggtttcgatgaaaaaatcgctaccggtatgaccgagtaatttttggatagtggccatccgtgcatcgttatctaagatttggctggccttttgtaaggcaaggcgggctgcatcccgtttttgaatagtgaccgctgaatcaaagtaccattccccgttggtcatcgccctaaaagcgtcgtcagtttcgtgcatattataagtcgcctccgttaattgtactctctaacgatagaacaatttatcctggagtgcaaatccggttagtgattgcagttcggaactatctatgggatgctaatcatagataatttttggagggcaatacgatggataccaagcaaaagctagcagataccttaaaagaattgatgaaaacaactccggtcgatcacattacggtcaatcaattgacaagcagtgctgacgttgcgcgcaatacgttttattaccatttcgccgatattaatgagttggttgcttggatttataatcgtgaaattgttacgcaactggcagtgtatcaacgtgaacgggattggggcgtcggtctagatgtcttggtaacttatattgaaaataatcggcatttctgtttaaatacgtttcattcacttaatcgagatttgctaagtcgctttttgtatcgagtcgcttttagcatggttgcaggggttgttcaagatttaaaggtggattgtccagcgactttccgagatgaaattgccaatttttatggttgggcattggcgacacagattacgcaatggcttgtaacaaatctacaagaatctaaagaggaattttatcagcgcatgcatcgcatgttaaatggtactgtgaaccatgttttacaaaataatcattagatttggacatttatcctgaattgaccatacagaaaccgccagcttgcagttaaagtaagaatgtaattagcaattatttctttggaggtgactgatatgtttttatttcaaaatatttcaggaatggattggctagtttggggactagtggttattgcattaatggttttaaatgaagcagctcgggctaacaagtggattggattaattctctttgttgggttgccagtcgttttaacgctctttgtttggccaacgacggctggtcctggtagcagtaccgggacttggttccactgggttaaagtgtactcagcattagcaggttgtttagggtttatggcgctgcgctttatccctaagttacaacacaacaagtgggcattgattttcccacccgcaattttagcgtttaatattatggaagctgtgattcgtgattttcaagtttcacacctacatggcttagtcgacggtgtgatcatgaatggtggcgcgtggaatatcatgaacgggattgccggaattattaacatcatcacaatctcaggctggttcggcattattatcagtcatgacaaacaaaaagacatgatctggcccgatcaaatctggccttggattatcgcctatgatgtttggaacttcgcctatgtttacaattgtgttggtgatcactcattctatgcgggcgctgcattattaatttcatgtacattagcagcattcctggttaaaaaagggagctggctccaagcacgtgcgcaaacattggctttttggatgatgtttacaatgagttatcccgcttttgtaacggattcacaattttcagtgcaaggtacgcacagtagtgctgctttgatgacaatcagtggtttagcactggtcattaatgtggcagtcttaattctccacatttatcgtgtcatgaagtataaacgcaacatcctaactgacgaagtctatgctggtacaaaggcctatgaccaagtcgtggcagaaaacacgtcggaaggtaaataaaacgaggctcaatgaaggcgcagttcaatttgaactgcgtctttttttgcattttatagtatgatagatcctataaaggcgggatcaacatgacaactttttattttgtacggcatggtgaaacgatggttaatcgagtacagtgtttcaatggtggtgggacgaattcaacattaactgaggcggggcaagcggctgctaaacgactaggtagtttattagcggaccagtcttttgatgcgttactgacgtcaccattaacacgtgccgttgaaacaatggatgcgatagtgtcgcagactaatcaatcacaaccggcaatcatggtcgtggatgatttaaaagaaatggcacttggtgattgggaaggccaacctggtgctagtttgacgaaccatccacaatatgaaaattacttccatcatccagagctgtttgatgccaaacagattcacgcggagtcctaccaggcggtcttagaacgtgggatgctcgcgattaagactgctcaaacggcgtatcctgatggtgatgtattagttgttgcgcatgggattattttattgtttgttatcaacacactactagggattccgtttgaggaaattcgatcacaaaaaatggttgctaatgcaagtctatccgtactaaaaagtaaaggcacgcagtttgaaaaggttgtgtggaacaaaacggtttaggaaggatttctggatgacaataattatgattcttttgatcgttgcgttgggcgcttttaccagaacggtttttgggtttggcgaggcattagtaacgatgccattattggccctaatagcgattgatttaaaagcggcaacggctttgattggcgcgctgggactaattgtggcgattccggctgtgattcgccaccgccaacagattgatatagcggttgtcagacgactagtgattggttcattattgggtgtgccagtcgggatagcgttgatgacgtatgtgccaacgacgattgtgttgagaacgttagctgggtttttaatcctttatggcagctataatcgctatcagttacaccgacatcacgtgcagcagcaacatttacagtcacatcattgggattatttagctgggataatatcaggcatgatgggcagtgcctacaatagtcatggtgtgccggtggtgatttatgggacattaaaaaaatggccagtagcatcgttaaggggcattctacaggcccattttatttgtgttgggacaatcgttgtaatcagtcatattctagcgggcttttggaccatccaagtattgcaactattgggacttagcttaccattattgttagttgtgattccgttgggcaattgggtgagcactcgaattgatagtcgaacgatggtgcggtatatttatgacttattaatcgtttttggttgtttgttgctgtataaaacgttgtaaaaggtcattaataggtggttggtttattaaatgatgtaaagcttatggacaacgccgcagatagtatactaaaacgatagtgtataaagtttaaatactaaggggcggaaattaatgagtaaagtattagttgttaaggcgcatccacttgctacagaacagtcacggacgttaacgattttggcgcagttcatgcaagtttatcaaaaacaaaatccagctgatgaaatcagttggttggacttgtaccaatctgacttaccagaaattgatcaagaactaatgacggcatgggcggcgttaaaaaagggcaagctatggccaccttaagcgctagtcagcaagagaaggtcgctcggtttaatcgctataccgaccagttcttagcaaccgataagtttgtgattgctaatccgctttggaatttaaatgtaccgacgaaacttaaagcgtggattgacacagtgatggtggctggaaaaacatttagacatactgaaacagctccgcagcccttagtaactgggaaaaaagcagttcatattcagtcagccggaagcgtttatgctggccaagattttgcaacacaatacgttaaaacaattcttggctttgccggtgttgacgaagtcattaaaattagtatcgaaggaattgattattcgccagaaaaagctaacgtgattatgcaggaagctattgaaacagctaaacaaacggcacaagttttttagaggcgatatagtggagggataaccatggattttgaattaccgatatatccagaaaatcaggcggcaatgaagaaatacatgcagagtcaatttgaatttaacggtgttaaagcaccggaccgccatttaattgaacgcgaattgtggcagtctgtgaaacaattgccaccagcagaaataatgcagttcattgagaccttatatgctcgaccaacgcgtgagtatcaatatgttgccatcgagatggcattgcgttcagtacgttggtgggaaccggctgatatggaacatttattaacgttggtgttggaaaaagtttggtgggacagcatcgatgcttggcgaaaagtatttggagagtacatcagactgcatcctgaacagtttgattgggttgtacagcattttataggtgctgagaatttctggctgcgccggattgcgattacgctacaactcagtttttacgaaaaaacgaatgtggcgtttttggaagaagccattctggcagatattgacacagatgagttctttatccaaaaagcaattagctgggctttacgtaactatagtaaggaaaaccctgagtgggtgatgacgtttgttgaagaacacgaactaacaatcttcgcccaacgtgaagccttaaagaaaatcaaacaaaacaaaatgtttcacaggaaacatacaaaaagcagcacccatgataactaatcaagggtactgctttttaataacttaatttaagagggtaacagctaataacaagtattaatggtactaggataagctaatttattatttatctaaacccgccagaactttagccggaatttgattcttggacacagtattaggcccttttaagacgcgttttgaattaaattcaactttgacatagctgttgggagtgagtggcgttggattttcgccagtaacttcgacagggaccacttggtggctaccatcttctttcaccacatttagttggtagtgatagctatacatattagtcactgttttacctgaatcatctttggtggcttctttagctggagattgagcagcaactttggcgtagcctacttcgccgacatacgtatttttgtattaacggtagccagcaaatccgacgatgatgagggcgattaccgcaataatgctaattgtttttttcattgaatgagaactccttattccgaattgataaagttatcatacgatgttaagcgtaaaaaagcgacgattttaagatcagatgacaaaagtgttagccgagttaaggccattgtcacctaatgtttaaattggcggtattgtgcttctaaaatagcgctatctaagatgtgaccgcgcattgccgctgtcatttgatttaggtaaaagccaggctgtaaatcgagcgtggtatcaagtgcaaatactttaagtgtataagtgtgatcgcggttagggggtgtcatcccgccgtagcaagcacttgcttctgttgataaatggtctgttttgggactgtgccaagtattaacaccttggatgaaatcgggcgcttgttggctagcattagccgcgacagtggtcgtttttaaattggcaagtgtccagtgaatccaaggaaacccttgcgtcacttcgtaggcatctagatcgtagaaaacggcagcataactgactgtatcgctaggtgcgtcttgaatgttaaacggaatggaataagttggcacaccttccgcgttaaattgagtgccatgaccgccgtagaggtcgtcgaagtagccgtgatgaatgccagaactgataatttgcatgttgaatctcttttctattttagattttagtccagtcgtcaattgagcgaccatttgtgtcgcatagttcgagccaactattggtgccaccaaagtacaagaagaggccgatttcattcacgctcttgaaaataatgtcttcagtcgtttgattgtcttgaatttgcgctgcatgttcgttgcgcaagtgagtgcccattttagcagcaaagccaaacgagccatccttattaagtggcgcggttggccacaattgtgcccccgctttcaataacatctctttgcgcttttgccagatggctgttccttgtgcttcgcgcgtagcaacagtgaattcgatttggctgacggcttttgtccatcgatgacgtgttttagccggttttgctttgactggtacgcttttggtcaggggataaccaaagcggctgaggaccaagatgatggcttcaacggctggagctaaggttgttcggaaattttgagagacgttggacggaagcgaggtgctcgttatcggtggttgattttgttcggctaatagctgccctacgtagccaatttgttcagtccactcaggatccatggtaatccagatacccgtgtcaacttgatcagtcgaggctgtttcaagtggggagagttgttcaatttgttgcagttgttgctgcgcaaaaccgaggaataaagcggggtgtgcgaatgcggttgtattagccggtgtttgttcaattaaaagctgagtaacgggttgttcgattaaatcgacgatcgtttgggtagccgttaatgttgcattaatttccaaggtcataggaagcctcctgacagtctttgatgcttctaattaaacactaaatcgctggttttgtcagccagtaagaattgattgaaggaatgcttgaaactgagattcaattaaccggaattaacgaatctttgttatgatagaaggtaggaattttaacgggtgggagaaatggcatgcaagcacaagcggtactaaaagaaaaatttggttatgatcactttagagaaggtcaagcagatgtgatcgaatcattgttggcaggcactaatgtcttggcgattatgccaactggtggcgggaagtcattgtgttatcaaataccagcattgatgctacccggtttaacgttggtggtatcaccgttgatttctttgatgaaggatcaagtcgatgcgcttaatgaaaatgggattccagccacgtttatcaatagtacgctaacgcagggggaagtccaagaacgctttaaccaagctgcgcgtggtgaagtgaaattactatatgtttcgccggaacgcttggattcggattactttttagctgatttagctgaattaacgattgatttgattgcggtcgatgaagcgcattgtatttcgcaatggggccacgattttcggccaagttatctacgcctgacggatacgattcagagtatgcgccaacgaccaacgattgtggctttaaccgctacggcaacctcacaagtggcagctgacatcatgcaacggttgaacattcagcacgaagttaagacggggttttcacggcagaatcttgcgtttcaagtagttaaaaatcaaaatagtgatcgctacttaatcgattatttaaaggtcaacaaacaaaaatccgggattatttacgccagcacacggaaagaagttgaacggctcacgaagctgattgaaaaggctaagttagatgtgacaatgtatcatggcggattaaacgaagcggtgcgtcgtcagaatcaagaggattttctctatgatcgcaaaccgataatggtcgcgactaatgcgtttggcatgggcattgataaaagtaatgtgcgctttgtcgtgcatgcccagattcctgggagtttagaggcttactatcaagaagctggccgggccgggcgtgatggcttgccgagtgaagcgattctattatttaaagtgaatgatgtgcagattcagcatttctttatcgatcagtcggaaatggacgaagcgcataagcaacaagaatatgccaagttgcaagaaatgacgcagtacgccaatacgcagcaatgtttgcaacagtacatcgtcaattattttgatgatgattgtgaagcgtgcggccggtgcagtaactgtctggatacgcgtgaagaacaagacatcacgattgatgtacaaaaagtcttatcgtgcgttaaacggatggatgaacggtttggcaaagtgttggtggcgcaagtattgacgggctcgaagaatcaaaaaatcatgcaattccgctttgatgaactcccaacgtatggtctaatgcgtggtgattcgcaaaaagaaatcagtggtttgatcgattacttagtcgcttcaggatatttgcaagcttctggcggtcaatacccagtgctgcaaatcacggcggcgggagttgcagtcttaaaaggccaagcgaaagtgacgcgcaagatggcggtcaaagtgcaaaaaacgttgcctgaagataatgaattatttgaacaactacgtgagttacgccgcgatttagcggaagaacaaggtgtgcctccgtttgtgattttctcggataagaccctatattcaatgtgtgaaatcatgccaacttccttgactgaaatgctagatgtcaaaggggtcggcgaaaataaactagaaaaatacggcgaacaattcttggatatattaatggcagaatagagtgctgagcattgactggatttaccaaattggcgatgtaatcgctgatttggtaaatttggttaagtgcagaaatatgctggcgagaacacgtttcaacaaaaaagcgtcaacggattctaatatccgttggcgcttttttagtatctagtatggtgcatctgctggattaccatattcaaagtgttggtttgactttggattgggtttcgcatcaggtagtaaacacgtataacgtgtaccatcaggaccttcagctaggaagatgcgagtaaaatcattttcagtttcgatcagcttgcagttttcgtgggttaacccataaacatcagttacttgcgtaataatcatctctttttcttaatttgaaaggagtagagtaaccgtacattctaccaccgacttaataataagtatagacttttattgataaaatttcaaattaatccccttatttggtttgagtttcaagctggtggagggtttgtttcaattcaagtccgccacgataccccccaatttgcccgtctttacggtagacgcgatggcaaggaataatcattaatagtggattgcgaccaatggcagaagccactgcgcgaattgcggtggggtgcccgacttgagctgccaaagcgctgtaagttgtggtttgaccatatggcatagcttgtagggcgacccaaacacttctttgaaaaggtgtgccgccgataatatcaattggcagtgaccacgtggtttggtcaccatcgagataagctgttaatgattcactataaggagcgattgcagcttgatttgcaactaatttcgtttggggaagaaaagtggttaattcactgatagtgccatcgggtgaaccaacaaaacagatacctttgggggttgctgcaataataaatgattggccagcatggctaaaagaaccatagaagattgttagcatttagaagccctccttttgattgccctcagtatagcatgcccgttaaaaaacgaccaagccgtaaacaggctcagtcgttttttacttagttaagcaactggttgaaaggttttattttgaagatgatactgaacatcacaacttgctgcgacttctttttcatgggtgacaagaatcacacatttttgttgttgatgggctaattcttggaagagatgaatgatctcctgcgtattttgttcatctaagttaccggttggttcgtcggcaacaacgatgggggctgaacagcacatagcgcgcacgatcgcaacgcgttgttgctggccacctgatagtttttgtacgttcttatgggcgagttcgggattgatgccaaccttgctgagcatttcgagtgcgaaatcggcggcactttcatgcgtcgaatgagtaatggccatcgcagtcaagacgttgtcgagtgccgacatgtaggggagtaagttgtaggcttggaacacgatggacacatagcgattgcggtattgggttaagtcgattttttggatatcggtaccttcgtataaaatactcccgcggcgcggtttatctaaccctgaaagcatggtgagtaaggtcgtttttccagcaccactgctaccgatgatgccgtaaagtttgccggcttcaaaatcgagattaacatctttgtaaagtgtattttcttcagtatcgtaccagtaactgacgtttttagctgttaacatagtggacctcctataattatccaatgagaattttgcgtggctcgagtcgtaaaatattgagtgatgcgagtaagacggcaaatgcgatgatggtgaagccgaatgcgccaagttgcattaaggtgacggcactaatcttcagatcaaggtcgcttgctttgacggcttttttagcagattggccaggttgttgcatttgaccacttggccgattgccaccagtttgcccactaggggcttgaccgccaccagggccgccgttaccgccaggttgcatgttatttgtttgtgagctggttgtcgtttcggttgtgacggaacgcataacttgtttgctaagcgcttgaccagcgaatcgtccgccaatgccggctaaagctaaactgacaatcagcagcatgaacatttcaactaataattggcccacgattttgacgcgcttttcacctaatgagagtaaaacgcccatttcataacgccgttcgcgaaccattaagataataattaatgcgaggataacagtgccagcgatagcgactaaccaaacaatcttattagcaaaactggccattttctgcatggattgtttgagtgattggtaagtactgtcatcagctgttaccgtgaatttcttcgtattgataatcttcttcgctgcttttacaaaactatttttcttagttgggtcactaagcgtgaatgtggcactatccactttgccagtttgacctttaatttggttagctaatgtgtatgccgtatagatgacgtttgcggggtctgtttgttgtggacccatgccagcgctactttgactagccttatagatcccgactacttttagcgtataggcttttttgcctgtcgtgctggctttgactttaatggtgtcgccgactttgaggctgttttctttagccaattcggattcgatgacgacattattagtgtttttgtcgctactatttaaagcgcgacctttcgtgattttacttgtattatctttaaagtcgctgagggttgcggtattgagcactccggtgatttgtaagtcacctgttgaagtggatgactcagcgttgccgccagggccgccgtccatcatgccaccactattatttgaactacttgatgtcgtaatggctttaatggacgaggcgttcgcagaagtcgtgacgctgacgttataatttgccagcccggataatttcgaaatagccgttacgtcttttaatttgacggagggcatggttaatttagggcgcgttgctgtagtacttggggcatcactgctagccgaggcgcgcattttcttaaacgcttgatcgcgatttgcagaaagggtgacgctagcgcccacctgttgtttggtattgttgacggttgtaatggctgcatttctaatcaatagaccagccatgataaaaatcatgatgacggtcatcacaattattaataagaagctacgcccttttttaaagatgacgttttgccaagcacgcttgataaaattcataagtatttcctccttaaaactgaataaatattagtttaggcgggaaatatgaataaattgtgtttgaaatgaagttttttttaaggcgtatttgtgaagattaaccttatagggccaactttctagctcctaaatatggtaaattatagggtatcaaagttaatcggaatgaggagagttaaatgaagaagcgacaacaattttttaccttattatggacaggattaatgttaataatgcctgttgtttcagttattggtagtgcacaaacggtgtctgcgagtgagacaaaggttacacaagtgacaccacgtactgcatctagtacggattatcaaaaagcaatggtggctggggcgcaacagttgttgaataatggccaaccagatgcatggtcagcgttagcagctattcaatcaggcgtgacactgagtgcagcgcaacgcttgagttatcataatgccttggttgcggatgcacaatcaatgctcgctgatcaacgtttttcggcaaccgatttagaagtgttggtaattggggtaacagcacttggtgaagatgcaaccaacttcgctggtttaaatataattgataaaattattgaaaaagcaccaactggtgggatcaacgggcaagtttacggcatcatcgcccttagcatgcgtgattatggtgccaaggcacagcaagcgattgatagtttaattccaacggttttacaagcacaaaacgctgaaaatggctgggcttttttcggtagtaaaagtgatttagatacgaccgggatgacgatgacggcgttggggatgcatcgtgacttcccaggcgttcaagatgcgctagataaagcggtaacgatgttgaaagaaaaaacatttgttgcacaaacgggtggttttttaatccctaatgtttatatgacagaagaaaactcaaatagtacggcaatggttgtcatgggcttaattgcagctggagttgatccagtcacaacatttgttggcgatcaaggcgctaacccgatttcacggctggtcgcttatcaaagagcagatggacagttccgctggaatattaataacgatatgggatcgctagcgatgtcaactgaacaagccgtttatacgttagcccaataccggttgttccaagcgggaaaaggctcaatttatgattttaaaacgccagttattgaaaaagcatcggtaaaggtccaagcagttgatgaaaagggacaaattttaaagagtcttcaattagctgaacaacccgttggtcaaaccattacggtgaatgctaatcaagtcgcagttgagggttatgaattattaggcaatgcacaacaaactgttcaagttgctaaaacgggaacgaccgtgacgttccagtatcggaaacaaatgattgggacaattcctgcagcgcagtttgctgacgttacggtgcaagcagtcgatcaaaacggcaaagtgtttaaaacaattcaattgcagcatcaaagagttggacgcacaatgttgattaatgcatctgatgttgcagttgagggttatcaattaaaagacacgccaaccaaatccatcacgattaatgcagcgaataatacaatcagtttcaagtttgaacgacaagtgactacggttgaaaaagaaaataaacaccaagcagacaatcaagatcatgctcaaataaagcaaaagcaattaccacaaacgggtgttaactcaacagtagttgcttctgtagccggcttgatacttttgactgggattattggcatttggttcaagcgtcaagttgaacatcgttaggagttagatatgtctaaaaagagaatcattgcgattatcggtagtttagttattttaagcggcatcggatacggtacctatcaaagtgtggctcaagataatccgtctacgcgtagtcaacatgttaaagaggaacatagatcaaaaaaacgggtcaagccagcaactgttggtttagatggtaaagttaaatctaaggcctctgagtcacatagtagggcggtatctgaaagtcggaaaacagctgaaacgcgcaagtccagcagtcaatctgaacagacaaatgaatcatcacaaaaatcggcctctagcaaacaattagcatcgcaacaagctgtagaacaaggctcggcagtccaatcggcatcgacccaatccgccattaatcaatcgtcacaatcaactgaaagtaaaccagttacaccgcccactacgacgccccaaccagtccttgaaaaggtgagcgtcaatgtttatggaccaattagtgaaggtaatccgaaatggttgaacggtgatcaagttgaaatcaaggatggggatatggtgattgatgttttaaaacgtgatttgcaaagtcgcgggatggcactatcctatcgtgggacgggcggcggcgtctatatcaaaggcattaatgggctattcgaatttgataaaggaccgttaagcggatggctttatcgagtgaatggcagttttcctaactattcttgtggtaattatcctgttaagagtggagatgtgattgattggatgtatacggaaaatctcgggaacgatcgcaacgcgcctcagggttaaaatcgcaactggtctttgatcaattaaatccaatcgtcatctttgcgtattacgtgattgcaattgcgttctcaatggtttttattcatccgatttttcttgtaagtgaattgttgatgatgattgcagtgaacttgcttgcgaaaaaccagaagaaaacactggggacattgcagggtgcattgttcatgatgctctttatcgtcgtgatgaaccctattatgaataatcatggggcgcacgtgattgcgacgtttggtgggacggtgatcacagcagaggctgtcatgtacggttttttaatggcgctttcgctggcgatcttaatgctagtgtttgtttcctataatcagagtatgacgaatcataagttcttatatttatttgtgcggctttcaccgcaactaactttattaacgatgattaccatgcggtttgtcccactatttattcggcggtttaccaatatcaagaatgtccaaagaacacgtggtgtgcagatggaaacggggagtgttagagcccgatcacatgccgggatgcgtttgatggaagtattattgattaattcattggttgacgcactacaaacggctgattcaatgacggcccgtggttatgggtcacagaagcgaacgagttatcaacgttatcgatttacccaacgggatggttgggtattggcaagtcttgtagcaggcagtgcactttgtttttattttgctaaacaggggattggccgcttagcgatttatccaatacttggctcgattcatttgaatcaaattggttggctatgtttggtgttagtcttattaattgatagtttgccgctattactagaaggatgggaatatttatggtggacattgcgcaaataaaacaatttaattttcagtatgcattggcaacccaacaaaatctgaaagacatcaatttaaccgttcagacgggtgacttcattacgttagctgggaactcgggtagcgggaagaccaccttattgcgccaactcaaaaaagaactctggcccgttggtaaacggtcgggtgagattattttcgagggccaaccgttagctgatttatcgcaagggttaagtgcgcagaagattgggatggtctttcaaaatccggataaccaattagtgatggatacggtcattcaggaactcgctttttcactcgagaatattggtgaaaagagtgcgaatattcaaaaacgaattgccgaattagtcagctttttaggtttccaagatttgctgtatgcttccgtgcatgatttatcgggtggccaaaaacaactggtcaacctagcgtcggttttgattttacagccggatcttttactgttggatgaaccaacagcgcaactcgatcccattgcgaccaaagaatttattagtttattgcaacgggtacatgacgaactcggcatcaccgtgattatcagtgaacaccagttggatgatattttaccgctctctaatcaactttggttgatggatggcggtgagataacgtatcaaggaccggttgctggtggattagcagcaatttgggcgcaaccggcattgcgtgaattcgtcccagatgtgccacacgtctttttacaaaatgagttgattgcaccagctgatattgcggcattaccattgaccgttgtcagtggcaagcaattgattgagcggcgacaatggcagttaacacatactaaacgtgaaatagccacgaacgaccaagcaacaatgctgcaggccaaacatgtgagttttcagtatgaaaaaaatgacccttatgttttagaccagctcaatctagaggttcataccggcgattggttagcgattgttggtaaaaatgggactggtaaatcgacgttgttgaagcttttgattggtttattacaaccgcgccatggtgcaatcaagttacaggggaagaagatcggtaagtgggcgcaagctgaacttttcaaaacagtgggttatctctcacaaacaccgagcgatcatttcagttatgatagtgtccgtcaagaatttatcgaacgggcgcggcagttaaaacgcgcaacaccagaacaagtggcagaagagatgctagcaaagctcggtcttcaaacccttgctgaacgtaacccgcaagatgccagtggcggcgagcaacaattgattgcactcgggattgtattgctagcgcagccgcagttactcttactggatgagccaacaaagggccttgatccgattcgcaaacgggcgttgggtgaattgttaacgcgtttacaagcggaaggcttaacattgattatggcaagtcacgatatggcctttagtgcccggtttgctagtcagtgtgccttattattcgatgggacgattgtatcggaggaagaaccttatgcctttttcgcgcataacttcttctatacgacaaccatcaaccgaatgttacgcagtcaattgcccgaagccctgaattgggaagaggtgcacgcatgaaagctttaaaaaatagttggaccacgtttggattggctttcttgattatggcgattttcatgttgtttatcgtcactttaaaaggacagcattttctgatcttcagttttatctgtttgattgccagtatgctgccattttattggcggtttgaaacccgggatattcgcgcccgtgaaattattttcatcgcggttttagcggcgattgcggcagtcactcgggtaccatttgcaccattgcccagtgttcagccaactagttttgtgattatcgtgtcggcattagtccttggtccagaatcgggttttattgtcggttcgaccgccgcgattgtctcgaatatgtttttgggacaagggccatggaccccatggcaaatgttttgctggggcatgatgggcgttacggcaggcttaattagtcgccatcagtgggcacagaataaatacttgctctgtatttttgggtttgtctggggctttatttttgggtggattatgaatctgtggtattttgtcgcatacgtcaatccactgacgattaagacttttattgcagcctatgtcgcgagtttctattttgacttggcccatgctttatcaaatgttttttttattttcttcttttatcagtcgtggtaccgaatcatcagtcgctttaaagtgaagtatggtttgttggcgacggaagatgagctataaaattgagccctcaccaaagtggtggggctttttttaacggacatcatttcatacttgaaagttcacaatttggtcccaactgcttggtattctataaatatcagataagcatctcccaagtaagtgaatctgagcaagttaattttatgagacaattcctccctaaagaagtgtcttagcaacacccaatgagttatagtttaacggtagaaccaatcatctaaattgaaattccttccaagaaaatcaaaagcgattggctattaaaagcgaagcgtaaaatgaatgattgatgtgggttcaatccccgcaactcgatgactgttgtgttaaaaaagccgcaaccaatttggttgcggcttttttgcgtttagtagaccaatccctgtttaccagtagtatggccagttaacagtttatcagtaatcatttggagattagcgaccgttaagcctgtgtagtgggcggtggtgattggatgcagaatccgcgcatcgattagccgcgcaatttgttggagaatcgccccttgactagtggtttggaattgatagtccgttttagtgaacatgtactcaaatgaaaatgaggctgatttaggcttaagcggtgcgagatcaagtggatgcgtattgccaacaatcgtaccgacttgtccaaacggtttaatcagccgtgcgacctcttggagatagctttcaatatcataaaggaccgcgatggcatcaaaggtgttatccggaagactggctaagttgtctaagctgctaggtgaatgataatccagcgggtgatcaactccgtttgtttttagccagtcgaaatgagtgagactgcttgtggcagtgacggtgaatccggcccacttggcgagttgactgagaattgatccaaccccaccggcaccattgataatcaatagttgtttgccacgattggcattttgttcagcggtaaaaccaagcttttcaaaaagtaattcataggcggttaacgaaacaagcggtaagccggcaatctccgcggcactgattgtactaggcgcaagcgcacaaatcgcggccggaacacattgatagtgttggaaactgccatcgatctgggtactgccagcatagaagacaacatcgccaggttgaaagttggtcacagtggcgccgaccgcttgcacggtaccatacccgtcatagcctaaaatggttgtggtgctagctcgtcttttaaggtcgacagggttgacgctacttgccctgactttgatcagtagctcttcaggtttaggcgtagggatttcaccagacactgcgtgccaattatgttcggtatcaagttggatttggtgattagtggtcatgatgacgtcatcctttctgaataaaatggttagtctaagcctactgctaatcaccgcataatacaaaaaaagacgcccaattaagaacgtcttgagttcatttaaattgcttcaacagtaacttcttcagttggttcatctgcagaagttgtctgtaaaaattgatcgcctgcaagatctttgtagaatgccatataagttgcattcttatatggcgttaaccagaaatagccaatgccaagtgagaggccagctaaaatatcccaacctaagaagcttagttgtaagacgaaaaaccggaatttatgcccattcattaactcacgactcttagtgatacaatctaaaaagctaacgtcagcttgtggatcgttatctgttaagtccttgaagatataagaagcttgagaataagcgtagcctttaatgatccccggaataatgaataacaatgcccaaaggaatgtaaataagctagctaaaattcgaattagaaaagcgcccaagaaataacgttttgagaagacactgaaagctcctttgagtgaactaaaatcagcatctttcgaacggagccaatctaagaaagtaaaattaatcccaagtgtaatgagccccaaaatgaaacttggaatttgaccagcaaaactactaccagacgaatggcccgaaaaagattcattggcagccattgatgggtcggtgtttgcgaagatggcaatcatggccatcaagactgctccgacaataatcaccccaataattgatagcagagtggggatgatgttcaacgtaacggcctttccccaatgaccagcaaataatgacttaacttcttttttaagtgaagcgcgtgattgatactctctttccatgataattcctcccttactacgtagataaattatactattaattaatggctgaaatcaatttatttttaagtatctttgaaaggattgttggggattagttgttgaatgcactggtacatcaggtattctataaataatagcacatcataattaaatagtgtaaaatataaaattaactatttttgttaaggggatgtatagaatgaataagggtcgattagaagcatttagcgatgctgtcatcgcgattattgtcaccattatgatcttggaatttaaaacgccagaaacaccggaaattaaggcacttttggaaaatggtccctacttttttgcgtatatcattacgtacgttttcgtaggggttgcttggtataatcattactatatgttttcgctgacgaaacgaggaacaaagcgtatttattggctgaataatatttggttattatccatgtcatttttacccgttgcaacggcttggacggggcggttcatcaatgaacgcggtccggaatatttttactacgtggttcatctgatttggttattggcctacttcttcttgagtgatgcattggcgaacgccaatcgtgaagtcgcccctgagcggtatcaaaaaattaaagccatgccgatctatagcacgattactagaccttatttctgggtgattcaagtgattctattagtcgctatttatttctttccacccatcgaattaattttcgtaatggtcgaaatttatacgattgggaatcgtaccgacaaagaaagtgatcaattattcaatgattaaaaaaacaccgctagcctattaggttagcggtgttttttgggagatctagaatttaataacaactttcccggttgagtgattcgtagcacttagttgatgggctttgatcaagccatcagcagaaaatgggaagacagtatcgataattgatttgactttaccatcggccattaatgcggcaatctttttaagttgatcaccatctggcattaaccagatagctttgaaagtcatattggtatctttaatgatggccgcagtttcaggcgcttcaccaacgattgaaatttggcgacctgtttcaggattgaggacagcccatgcatcgacttgtccttgacccccgatagtgtcgataacgagatcgacattgtgggctttatcggccactttttcagttcgatagtcaatgatttcatcagcgccaagttcacggacaagatcgaagttcttcgcactagttgtggtgataacgtgggcgcccattgcttttgcgaattggatagcatatgaacctacgccacctgaaccagcttggaccaggacggtttcgcctggttgtaggtgaccgtggttaaagagtgcttgccaagcagtttcgccagctaatgggacggcagccgcttcttcaaaagtgacattggctggttttggtgcgattaagttgtcatcaacggcaacgtattcagcataagtaccacgatttgaagtggcaggtcgtgcgaaaacttcatcaccaacgtgccattctgttacggctgatccaacggcaacaacgaccccggaaaggtcccagccaagaacgattgggaattcccattggaacatgcttgtgagatgaccttcacgtaatttccagtcgagtgggttgattgctgtcgctttagattgaattaggacttggtgttcaccaattgtaggcatcggtaaagtaatcatttcaagttggttttcgtcaccatattgttggatggcaacagcgtgcattgtttctgacatatgaatagcctcattttcttattattagtaagtgtagtgtaccaatcaaatggttgttaagtcaattaacaggcttaaaaagtaaaagaaaagcacccaatttggttaattggatgctcagaaaataatgctgttaatcctcaaaggctaacctgtttgagtcagcactctgtatcaaacgtgctttttaaagctgcctcttgcgcttagccacgtacctgtaaacgatcgtctttggcgctcattcacggtacgattctaatgctcagaggcaaaccgctttaaacgcactttatatcaaacgtgcttctcaaacagccttttccggttaactacaaaacggacatcatggctgagacccgccataatgcccgtttttacgttaatcctaaaagtctaactcgtttgagtcagcactctatagttcttcttctgctatttttgctagtgttgtttttgatgggatgaagaatagggcaccagttgttggttcactgaagtcgagtaggtggtcataattgccggctggtttgccgacgaacatattggttaacatgcgttttgtcactgaccatgttcgagaatagccgataaagtaagtaccggtcattttttcgccagggtttgcgtatggaacgttcatgcgaacaatcttatgttccacaccgccttcgttatcttgtgagacaacgttgtgcgcgttggttggcttttcggcgtcagcaagttctaagtcagaaaactttttgcggccaattgttttttcttgttcttcagttgaagtatggttccagctgtccatggcatggatatatttctgtgcaaaagcgtatgaaccgttgatgaattctggatcttcatcgccgactaatgcgtatttagcagtttcatcgatagcgggattttccgtaccgtcaatgaagccgatgatcgcgcggccttcgaagtaacggaatccgtgtgtttcatcaatcgttgttgcgttatcagaaatgaattgcatcatttgatctaatacttcataacaaaccgccatttctttggcccgaatatggaagaaaagatcacctccggttgcgacggcatcatgtttagggcttggaattgccttgaagggttccaattcctttggttttggtgcgttagggaataagtaatcccaagcatccgagccaatcccgaaagccacgcgtaagtgggcatctgggtaacggatattcatgctattgatgatcgctggaatgcgcgctgctaattcggtaacagccgctttgtccgcctcggcatcttgccgattcaatttctgggtgacgaaaatgatgttctcgccagcatctttaaaaacgtcttgtgcatctgtgggtgtaattgccatgttcagaacctccaaataaaaatttaaagttagttatttataatcattattatctagctcagtgcaagcataccaaaaaacggttttttttaccagtcccaataattaaaaaaagacatataattggtagtcatcctgaattctggataactaccaattttttattaatgctcagttgctgaacgcaaccaaacgcactctattcttaaacgtgcttttttaaacagcttcctgcgcttaaccaaatttgccaaatcgccgattgcatcggtaattcgtcaaatcctgttaatgctcagaagctacccgtttcaaacgtactttatttaatttctgctaatgtcttttcaagatgggctaggacacggtctttacctaacaattcgattgaatcaggtaatgatggaccatgcatttcgcgagtcgttgcaatccgaattggcatgtacaattgacggcctttaatcttcgtatctttttggatgcctttaatgatttgcataatccgtggtgctgtgaataatgttaaatctttcaagcgttcgctgaattccttcaaaacaacggatgctgtttcgttatttaattcttcaagcgcttcggcgtctaattgttcaggttcttcaaagaagacatctgacatttcaacgatttgagctgtgtagctcatttgatcttggtataacgcaatcaaatgacgggcccattcgatcattttgctatcaggattttcagcgattttacccgctttaatcaagctttctaacgaaagatccatgattttgtttggatctgattgtttaacgtattggttattcacccattcgagtttcttttgatcgaaactagctggtgatttgctcaaacgttttggatcaaattgtttgatgaattcttggcgattgaacaattcgctttcgccaactggtgaccaacctaatagggcgataaagttaaacatcgcttctggtaagtaacccaattcgcggtattgttcgataaattgaagcactgattcatcacgtttacttaacttcttacctgtttcagtattgatgatcaatgtcatgtggccaaagactggtggttcccaaccaaaggcttcgtagacagccaattgttttggcgtgttggcgatatgatcgtccccacgcaagacatgggtgatttccatcaagtgatcatcaacgacaacggcaaagttatatgttggcatcccatcgcgtttcatgatgacaaagtcgccacctaaacgatctgattcaaagctgatttcacctttaacaatgtcatcaaacttgtaaacgtgatccttaggaagacgtaaacgaacaactggttgtaagccttttgctttagcagcttcttggctagccttaatttcatcatcactcataccttcgtattcgtagatgtaacgtggtgcttcgccagctgctttttgggcttcccgttcttcagttaattcatcttctgttttgtatgattcgtaagctaatcccttagccactaactcttcaattaaaggcgtgtaaatttcgcgacgttctgattgacgataaggaccaaagtcaccaggcttatctggaccttcatcccaatccatacctagccacttcaaattatctaactgactgttttcaccgtcagcaatgtttcttttcgtgtcagtatcttcaatccgaatcacgaaagtccctttgttgtgacgtgcaaataaatagttaaacaatgctgtacgagcattcccgatgtgcaaatgacctgttggacttggcgcataccgcactcggattttattttttgccataaaaaaaacgcctctttctaaaattatacttgtctactagtttaccgttattatgcctaaaaataaaggctcagagaccactaatccacaaaaaaagaatctaggacaaaagtatgtttgtcccagacccttcttctgatagtagaattctatcatttaaacgtgctttttgaaccatcttcctgcgcttaaccaaatttgccaaatcgacgattacatcgtcaattcgtcaaatccagttaatgctcagaagataaccagttcaaacgcactcttccacttaaacgtgcttacactaactgcctcctgcgccttgctacatcagtcacatcaccggctttaccggcaatccgcctgattaggcaaatgcttaaaagcaaaccgttagtgacgcactctcaccgcattaacggagtggtgtccattgccattcttcaacttctggtaaatcagtaccttcattgcgaatgtattgattgtgtttagcaaccatgtcatccattgattgtgcgaattgaccagcttgatcaccaagtacgtcacctgcaacttctttagatagactgaaacgatccatttgattcaagacacgcatgtcgaatggtgttgtaatatcaccattttcacggtagccatgaacatgaaggttatggttgtgacggtcaaagaagatatcacgtactaagccttcgaaaccatggaatgcgaagaccactggtttgtcttttgtaaagtacatgtcgaattcttcatctgttaaaccacgagggtccactttaggtgaacgaagtttcaataaatcaacaacgttaatgaaacgaatcttcatgtcaggatattgtttgtgcaagattgagattgcagccaaactttcaagtgttggttctgtcccagcagctgcaatcacaacatctggttcagcatcttggtctgtacttgcccagtcaataatcttcaaaccattcttaactaagactgttgcttcgtcaattgagaaccattgttgacgtgggtgttttgaagcaaccactaaattgatcttttcttggctcttgaagacagtatccattgttgctaacaacgtgttagcatcagcaggtaagtattcacgaatgaattcaggtttcttttcagctaagtgtgttaagatacctggatcttgatgtgtgtaaccattgtgatcttgttggaaaacagttgatgtggcaatcacgttcaatgaaggatacttgttacgccatgcttgttcatcagccttacgtaaccacttgaagtgttgtgttaacattgaatccacaacgcgcaagaatgattcgtaacttgcaaagaaaccatgacgaccagttaggacataaccttctaaccaaccttcagcttgatgttctgataattgtgaatcaagaacacggccttctgttgccatgtattgatcgtttggttctttgattgattccatccattgacggtttgttgcttcaaaaatatggttcaaacggtttgacattgtttcatcagggccgaagattctgaagtttttattttgatcgttgtctttgatgatatcacgaacatattcgcctaaaataatcatgtcttgcgcaacgactttaccgtgttctgaattatccacagcataatcacggtaatctggtaagcgtaatggtttaggatcaatcccaccattggtgattgggttagcagccatccgttgatcgcctttaggtgcaatttctgcgatttcaggttttaattgacctgcttctgtaaacaattcttctggacggtatgatttcatccaatctactaatgcatcaacatgttgcatgtcagcactgtcaattggcactggaatttggtgcgcacggaatgaattttcgattggtacgccatcccatgtcttaggaccagtccaacccttaggtgcgcggaagacgatcattggccatactggacgagatgaatcgccgttttcacgcgcattcttttgaattgcttggattttttcgatggcttcatccattgcagcagcagttgctgggtgcatcttttcagggtcgtcgccttcaacaaagattggttcccaaccattgccttcgaagtatttcgttaattcttcatcactcttgcgtgaaagaattgttgggttagaaatcttgaaaccgtttaagttcaagattggtaagacagcaccatcattcttaggattgatgaatgtgcttgataaccatgatgcagctaatgggccagtttcagcttccccatcacccacaacaacagcagcaatcacgtctgggttatctaaaatcgcaccaacaccgtgtgataatgaataaccaagttcgccgccttcatggattgaaccaggtgtttcaggagccgcatgagaagcaacgccgcctgggaatgagaattgtttgaataatttcttcatcccttcaacatcttgagaaatttctggatagatttctgaatagctaccatctaaatatgagtttgagaccatcacttgaccaccgtgacctgggccttcaacgtagaacatgtttaagttatatttattaattgcacggtttaaatgagcatataggaagttttggcctgagattgtcccccagtgaccaattggttttaccttaacatcttttgcttccaaaggacgtttcaatagtgggttatcttttaagtataattgaccaactgagatataatttgcagcccgccaaaatgcgtcaactttagcaaggtattctttgcttgaataatctgtcattttaatagcacccctttttaattttaaaaaagttcctaatagctttactttaagttccagtcgcagcttttgcaactttgttgtttctgactactctcttatcatactaaactttttaaaaaagtcaaccatttttaatattgggtcgtaccaattttttgaatctaaaaatagcggccctattcgcgaccgctaaccgtaacgaatgtattatatttcatgtattggtagtgcaggcgcatcgttgaaaattcaaacggtgtcccatcgtctaagaagaaaatcccttccatgatgccaactggttccgtcggtttcaactttaagtgcgcttgatcatcatcagttgatggttccgcgaaaattgacaggaaagcgcgtgtgacttcttgatttttctcggtttccaagtagttaaagattgaactcgacacaattttttctgtcaattcgggcattaccttaatcggaatgaagcccgtttcaatcatgaatggttcatcatcaaacaaccggagacgcttgatttcgtaaacaaaatcatctggtttcaggaacaagtctcgttgcaattccgcgctcggcttgatgacttggaaatctaataatttaatccccggtgtccgattaccggctttaaaactgtcggtaacccctaggttagagccattgtaattaaaaaacgagccaccctttaaataaagtggattaataaaggttcctgaaccccgttttttgaaaatgatcccttgattagacataacgtttaacgcacgtttgaccgagctacgactcacttgatagtgttcagtcaacgtccgttcatcgggtaatttcatgctgggaaatgattctgcgttaatcgctttttttaagtccgcgataatattctgataaactaagtcggccatgctaaactcctttataaatcattttatctcaagcttattatacatgattcctaaaagtcgtctacaaacagactcgataaatgttcaattattaatgcaggccaataaaaaaagaggtgctgagacaatgtttattgcctcagcacctcgcgcgctccagatcagactatcttgcaaaaaatgcctcacagcgcctactttttatttaatgtgcttgaaattgggtatagtattctgctagtaattgggcaatccggttcccagtaatggcataattttcagcgggttggttagctaatgaaatccgcaagtagccatcatcagtccccattcctgccccatccatcacaacaacgccgtatttagctgcaagtttatcttcgaaatcaagatagctcacgtgcttttcgaaatagtcgtggaattcatgcccatactttctttcagcaaaatcatagatgttaaataccgcataatattcagcgttttctttagagtgatcacattccatgcccatcgattcccaaaaagcgttgtatcgcgcatcaaccattttcttggaagcttcgatgtatggatccttttcaccttcgtgaattaagctggtcaaactaaatagtgccatcaaaatttgttgtggtgttgataatcccgcggtgtggtacaacgcgatttcacgactgtcagccactgttcgatcaatgaatttcatcgcaagcggattaggcgccacaactgagtaccgtttttcaaaagctgccttaatcgctggttcttcagccgttcgcttagcaataatttcatcaaaaacattatcttggtgcactgctagtaagcctaaacgatgcccagttgccccataaagttttgaatacgaataaactaacatcgtatttcggggggcaattgagtaaattgtttggaaatcattcacaaaagtcccataaacatcatccgtaatgatgataatttctgggtttgcttcaacgacctctttaatcttagctaacgcgtgtttgctgaaagcccgcgaagtggggttcgttggattaaccacaaaaaaggctttgattgtcgggtccttcaattcttcaaacttggcgtccatcatttgccagttgtcatcttcaacggaactcacatcgaattgctttaatttatattcacttaattctgggatttgcaaataaggggtaaagattggggtattgatggcaatcgtgtcgccaggccgtaagatatggctgatcttcaattccttgaacaaataaaccattgcggctgttccgccctctgttgggaagacatccgtttgattagctaatttttcaccattatatagtgacacttcaaggtatttatttaggattttttccacattgattaaacttctcgaaggtactggatagtgattgccaatcgcaccgtcgacaaattcgtgaaccaaatcatcctgattgaggcccatgtgcttttcggtataatctaaaaaggctaatataaatcgatctgttttatgactggcatcaaggtaggcatgcagccgttgtgcaatccctgctttatcaacgtagcccgccatatctccatcagcctcgttaattttcttagcagattcttcgacgccaaattcgacaagcttattaaaagctaatcgcgcccgcgtattaatccagttagggtccccacgaccaacattaattggcgcattatgcattgtatttttttctgaattttctaagaacaaagcggcaacttcaaagtttgacatctcttttaatcgctcaatatctaatgagtgcatcgtttttccacctttttcaattacttgctacattcataatcgcatctaaaagcactttaacgctaattgacagtcaaaataacggctagcattgtaaatttattgtttgatttattatatcgtttttgtctcaaaaataaagcactcattcaaaaatcaaaccataaatgccacagcgattctccaacttcatattgcatcatttaccacaaacctgcaaccctgcggcgggattttttctaatgctgctaaaaaagcacatcatcgttcaacgatgatgtgctttttaaagttttaagcgacgttattccttattttctttgaagaacttcgcgaaatttttgcggtaattgtgcaacatccatttaatcaatagccagcgtttgagattcatatctttgctatattcaaaagtggtgccgtaacgtttttgtttgatgagtgccaatgccttgtctttttcggcattattgcgggcatatttcttaaagacatccactgaaacgcccaaccaaagtgcgggactgtcttcatctttattcgcccaaacaacaggttcatcttgcaagtcgtttgtcacgtaatcgcgcaccacccattgggctaagttatagccgttcaaggtaacaaagaaactactgcggcccatccgtaaattgatgtcgaataacttgtaggtgttatcgcgttcatcatatttcatatcgaggttggcataacccgtaaactcgatatcttcaaggaatttttggacttgttgataaatttgtgcgttgtattccggcaaaatcgccacgtaattcccaatagctgcgggtgctggatcttccaataatggatggcccagacacatcatcttcacgtgatgttgttggtcaacatagatgttcatcacgtgcatccgactgtcatccccaggaatgaagtcttgtaaaatcatgtctgattggtagccattttcatatacttttcgcatgatgtcttggaattcagcttcacttttaatcgtgaaagcttttttgcgcccttcaaaatgcacatcaagccattccacagaatccgccggttttaacgccactggatattggaaaggttgttccacctgattatcttcaaccatttgcttggtaatgatgtgcgtcttgggataaggtaagtcatatttgtcacagatttcatagaaggtttccttataagtcaacttttctagtaaatcgtgatcaatatatggacaaacaaagacatcttccaattccgctttatgttgtgaaattaagctcgcatagccatcaccacagccaatcaaaatgactgggccatcgctatcgcgatagatttcctttaattttagcatttcagtaatgaatccaggatcttcactgaagcctggaatcaattctaaatcgacgatttttgtaaaccgagttggtgctaattcctgacttgcgtaggccttaacaggttcatgatacatctcataaaacgaacgggccatcccgtaaacgttaaaatcgctccccaataaaatgggggtgaagtttttaccgtttgcttgcatgctgtcaccttctatatcaatatttatcgtagtataccagactgccgttcaatatacgtcagctcaggatgctctttgttaaaacttaattagtaattgctacttgttgtatagcccgtcgacaatattttggccgaccactgtcatcggatcaatcactttgtcgggatacaatggaaattccgactgtgcaacactcaattcggtacagcccaaaataaccgcgtcacaatcatagtcatttaacattgtatcgacaattttttgatacttgtcatggctgaatgtcccagtcgccttaatgtcatcataaatcaaactcatcgtggcatcttgcaatgtttggtcgggaacaacactttcaagaccaaaagcagcaattgctttttgataaataccggcttgtcgggttccggttgtgctgagaacaccgattttcttcaagccgggaattgtttgttgcatgtgtttgaccgtttcccgtggcatgtggataatgtcgaaatctgcggcagcttgtaattcgtcgtagaagtaatgggctgtgttacaggtcattaccatgaacttcggcgctaacaaattcatttggcgaatatcttttaacatcacgggcaacggattttcttggctgttgtcgaggatgtaggctgtgcgatctggaatttcagcgtggttgaacacgacgtaattcagataatcttgatccttcttagccggtgttaattcatcgattagatgtacgaaagtttcggttgccgccgtccccatgccgcctaaaatcgtaaacatttcttccatggcaattctcctttacttaattgacttcatttgatgctggttagtccttcttttgaggactcacttcgatacctaattcttctaattgttccggtgtcacttcactaggcgcattggtcattggttctgtggcccgggaatttttagggaaggcaatcacgtcacgaatattgtcgcgactagcgagcaacattgcgaaacgatccaaaccaatcgctaagccgcctgatggtgggaaaccgaatttcatggcatttaataagtggccgaaacgttcttgagccacttcaggggcaacccctaaaacagataacattttttcttggacttctggattaaaaatacggagtgaaccgccacctaattcataaccattcaagatgatatcgtatgaaattgcatgtgccttatgtggatcagtatccaacaatggaatatcttcatcacgtggacgcgtgaatggatggtgggctgcaatccatttgccaaagccttcatcatattcaaataatggccaatcaacaacccatgtaaatgcaaattggctcttatcaatcatatccatttctttagcgaagtgtgttcgtaagtaacctaagctatcacaaaccacttggaagttaccggcaacgattaaaattaaatcatcatccattaagttcaaacgttcaacaagcgcttcttggtaaggtaataagcctttagcagaagcccctgataatttatcaccagcgtatttcgcccacaacaatgacttagcgccgtaacgttcaatgtattgttgttgttcgtctaacgctttccgtgaatatttaggggcggcattattaacgacgattgcgcgcacatattggcctgcttcaacagcttcagagaatggcttgaagtcagaatcttgcacgatttctgtaatatcttgaatttgcatatcaaaacgaacatccggtttatctgaaccatacttgtccattgcatcttgccatttcaaacgtgggaatggtgtttgcacatcgatgcccttgacgtctttcataacttttttcaataaaccttctgtttcggtttgaatttcaacgtctgataagaacgttgtttcaacatcgatttgtgtaaattctggttggcgatccccacgtaaatcttcgtctctaaaacaacgggcaatttgatagtacttatcaaagccggctgacatcaataattgtttgaagagttgtggtgattgcggtaatgcgtagaaactacctggataaacccgtgaaggcaccaaataatcgcgtgcgccttcaggtgttgaactcgtcaagttcggtgtttcgatatttaaataaccattgttatcataatagctgtgaactgcacgagtaatcgcagcccgtgttttaatggcattttgcatttctggtcttctaagatccaaataacgatacttcaatttcaaatcttcagaagccgtattgttatctgaaatttcaaatgggagggtttcagctttgttcaagaccactaagtctttaacaatcacttcgattttccccgtcttcatgtctggattaatggccgcttcatcacgcgccatcactgttccttggacttcaacgacatattcactctttaatttacttgctacttggaaaatatctgcatctgtgtcttgattaaacaccaattgaacgatgccttcgcgatctcttaaatcaacgaaaattaagttcccaaaattccgttggctttgaacccaaccatgtaatacgacttcttggttgagaaattcttccccaactaatccacaatatgttgttcttgttctcatatttgccaatcctctctgaatctacattttataaaaaataaaaaaagcaccctcgtctttcgacaagggtgctttgcgcacggtaccacctttaatttcagctgttgataacgctatctgctagcgggatattcatccaagcctcaaaagctgtcaactggaatcaataagtaactttcaacggggttactctctctgtgattgatcgctaaaaccaagtactttatcgatggctacattttattataatgtccaaaatatatcacaaagccctttaaccgtcaagttttgcagttggattgagctagctggattcgaaccagcgcatgacaggatcaaaacctgttgccttaccgcttggccatagcccaataatgcggcaccaagattaagttggcgccgtaaattgattgaattgaaacgtgctttcattaactgctttctgcgttttgctacgtattgcaaacaatcagctgtgctgattattcacaacactagacaagtgttcaaaagcaacccgttaatgacacactctaaacgtgcttttgatgacaacaatttccgcttaatctaaaattcccaataatcctaaaaacccggattattgggaattttgtattaatgctcagttgttaaccgtcatcaaacgcactctaaacgtgctttggcagccatcttcttccggttagctacatcagtcaaatcaccgactttgtcggtaatctgcctgattaggctaatcctcagaagataaccgactgcctgcgcactctttaaattaccatacaaatagtccgactgttgctgctgaaagaagtgatactaagattcctgatagcaacatgtagccgacgtttttggcaatcatgtcgttcttttcacggtccacaaggcctttgaaggcgccgatgatcatgccgactgttgagaagttggcaaatgatgtcacgaagaccgttaagacagcttggtaatgtggtgcgaagctcccgattgaatgttggactttacccatgacaacgaattcgttggtcaccaacttcgtccccatgaattgtgcaaattcaaaagcgtggtgcacatcaagtcccattaaccatgcgaatgggaacatcacgattccaagtaaatgttcaagggtaatccaagggttcactaattgaagcaccttgtcgatcaaggcagccaacgcaacaaaggcgatgacgtttgccgtgataattaaaactaatttaccagcatttaagattgaatcacctaagaatgagaagaatggttcacgttccactttgccttcaaccatttcggttgcttcaacagctgcggaaccactcccacccattttagcaatcgtatcttcttcgggtgtgactttcactgggtttaaaatattggtgacaataatagcgttaataatgttgaccggaatcgccgttaaaataaattggcccggcatcatttgtgtatatgcgccgatgatggaagctgtcacacagctcattgacatcatcgcaagtgttaatgttcgttctgctttcatttgtttcaattgtaagcttgaaacagctaatgcttcggtattgcctaaaaacatcatttcaactgcaaagaatgattcaaactttggttgtcccgtaatcttagctaacccacggcctaaccatttaatcacccaaggcaagaccccgatatacgttaagatatcgaataatgggataatcatcaagattggtaataacacgctagcaacgaaatccatttgtttcacattgacccaacttggtagtgcaaaagcaatcccagtataggcaacttgcactaaccagttaaagccgtttgctgcacctaaaacaatatcccgcccgattgaaaaactcgttaaaaaccaagcaagcactaagttaatcactaacatgattaagacggagcgccaatcgatttctttctttttctttgagaacagaaagccgactccaataaaaatcagtaatccaacaacatttacaagcaaatacacgacacgccacatccttcatttgtctttttcgtaccgctttaaataataccgttcccccttgtaaatgtaaactattgttcaccccctaattgcataaataatcacttgttaaacgcaactaaattagtccacaaaaaaagcggtccccttttgcaaaggaccgcttttccattcatttttaatagcccgcattccactgatttgtagactgttgcgtttgccaagtattggtcgtgttactgtaatcgttgttaccactataagttgcactgttcgagtagccatagttactttgcgtcgtcgttgcagcactctttccaccattcatgacactttcagaataaaccgtaaactcttgatgattttcttcacctgtaaagttggtattcaaatcgttttgtttggtttctgcgttgttaatcgttgttttttctaatcccagtgacgttctcaagacatctgaaacgcgttggatttcttcattggttggaatctgatacgagctaccatcaatatcagcattacgtccagttaaaacatcagactcaattgatttagctgcctttcgataatttgcttgaatcgctaccatgtcatcaaaactgaggttagtggcaacactatctgacaaggagtctaagatagattcaaagttggtcaaagatttaagcgagactgcagaattaatcatcgacgtgataacttgtttttgccgtttttgacggccataatcgccttctggatcatcgtaacgcattcgtgagtagtctaaagcggcttttcctttcagatgcatcttgcccttagtaaactcgctcccgttccattcgaacgtaaatggtacgtcaacatcaacgccaccgacagcgtcaacaatcttcgataagccccccatgttaaccgtgacatagtaatcaattgggacatcgaacatcttttcaaccgtcgacatcgccatatcagaaccaccaacattataggcagcattaatcttctgcatgttaaattcatctgcgccttgtaactgcgctagcgtatcccgaggaatgctgaccaacttgacctgctctttatctggattgactgtcgccacaatcattgtatcggaatttcctttatcaacccggccctcagcaccagtatccactccgagtaataaaatagagaatggttttttatgtttaatcgttttagcggcttttttagtcgcatttggtttataaattttattcgctgcagacttcacttgattactgatgcgtaatgcatacgcgccgccaccgaagaggactagcgttagaatgagtatcaaaactttcatcgtgcgatgctttttaacttttttgtagtttgcttctcgagatccgaaaaatttagaattctgcataggtgtttcccttctattatgtatcataccggcattaataatgttatgttgctattatagcggaattatcatttcaaacaacgccttttaagaaaagttacacaattttaataattccttcaattgttgaacaacactttcctaagcgcttttatgctaaaatgtaagcaagtcttaattatggaggtttcatatgtcaactcaacaactccccatccgcgatgctgttccagaaaagctcacatgggacttaaccacgattttcaaaaatgatgcagcttttgaagtagcctttaagaaagttaaaacgcaattacccacactcaaaacacttgatcgtccgtttgaatcggctgatcaattagtcgctacaatcgaacaaatcttagccactttccgccagctcgaaacaatttacgtttatgctagcatgaaaaatgatcaggatactgctaacgcaacttatcaaggctatcaagcccaagtggacagcttagcggccgaagtttcagcagcagcggcctttttagagcctgcgattcttgctattccggctgggcaattagcagattggcttaccaagacgcctaatttagcagtttacagccatttcattcaaaccattaccgatagtcgagaccatgtcttatctgggcaagaagaagccttgttagctgctgccggagatatcttcagtgctgctagtcaaaccttcagcgtcttagacaactcggatttacaattcccagaagtgactgacgaaaacggacaaacgttgcagctttcagatggggtctacagccaacttttacaatcaaccaaccgatcagtccgccaagcagccttcgaagcactttacaaaacttatggtcaattcaaaaatacatttgcgacgacgcttgccactgaaatcaaaggtcataattacttagctcaagtccatcactacgatagtgcacgccaagcagcgctagcacccaaagcaattccagaagccgtctatacaaccttggttgatcaagtgaaccaacacttaccacttttacatcgctatactgaattacgcaaaaagcaacttaatttatctgaattacacatgtttgatctctacacaccacttctaggaaaacccgcattaacctacacttatgagcaggcgcaagcaactgccaaagaagcattgtcgatcctaggacccgattatgccaaacaagttgcccatatttttgatgaccgcttaatcgatgtttgtgaaaaccaagggaaacggagtggcgcctattctggcggcgcttatgacaccaatcccttcattttattaaactggcaagatgatttaaacaacttatacacattggtccatgaaacggggcatagtgtccacagcgccttcacccgtcagacccaagattatgtttatggcgactatccaattttcgtggccgaaattgcgtcaacaaccaatgaaaatctcttaacggaatatttattgcaaacacagtctgatcctaaggtccaggcctatctattgaactactatttggatggttttaaaggcactgttttccgtcaaacgcaattcgctgagttcgaacatgcgatgcatgctgccgctgccaatggtcagccactaactgccgagttcatgtcacaacaatatgcggacattaatagccgctactacggacctgccgtcgttaacgatccacagatcgcccttgaatggactcggattccacatttctatatgaactattatgtttaccaatacgcaaccggctttgctgctgcaacgactctcactaacggcattagcaccaaacagcccggtgctctcgatcactatttagactacctaaaagctgggagctccgcctacccaattgaaattatgcaacaagccggcgtcgatatgacgagtgccgactatctcgaacgcgcttttgcagttttcgaagaacgtctggatcaactcgaagccctacttgctaacctaaattaagcctcatgaaaaaacgccctcaatgattgaggacgtttttttaacggctaattcgtcgatgatataacaatgcaataaagtaaaagccaaactcaatcgtggcgatgaagaaggtcactggccagttcgttagataaccaagccataaaccgagccaaacccctaataacgctgcggcaaccgagattgccaacatcccgggtacgctcttcgctaaatatttagcaatgaacgccggaatcgtaactaagatgaatactagtaatgaccccacaatctgagcagcaatgctgacactgacggctaataaaattaagaaataaatcgatagtaagttggtctttaaaccttgtgcttgagcgccaatcggatcatatgaatcaaataccaagtaccggtaaaagatcaacagcccaatcataattgccccagataagatgattaattgataaacatctgctaagctaatgccaataatcgaaccaaataaaatattggtagcataactagcatttcggtttgaaagggataaaaagagaatccccaaaccgacaaacagacttgaaatcgcactaatcgacgcttctcgccgtgattctttggcactcatctgaccaatcgtgattgaactgagtaacgtgaacaataacatcccattcaatggtgcaattcccatgaaaaccccaaatgaggctccggcaaatccaatttcagatagggtatgcgctagaaatgacatgttccgcgcaacaacaaataccccgattaaaccgcaggtaattgcgataaaagtactggcgacaaaggcatgccgcataaaatcaaaagttaacactcgcttatcctccgctttaatctaattccaaattgggatccaactgactcattggtccggcttcatattgacctcgttttaaaaataggtattgatccgtgtatttccgggccaattctaaatcgtgggtcacaaaaataaccgtcaaaccatgttcccggttcaactctgcaaccaaggccatcacttcttctttagtttcaatatccaaactcgctgtcgattcgtctaaaatcaacaagtctggtttactgattaatgcttgggctaaatacgctttttgcttttcaccaccagaagcattccccacggtcgtcttttgcaacgcggttagatgggtctgttctaaaatttgatcaagcgcttggcgttccttgcgcgatttccacggtaagtggctatcaagttgattcaaactcacaaaactacgaatggacaacggatattcagcttctaaatttctaaactgtggcacataaccgatgtttagcttttgcttatccgggttaaaaacgagttgtccttctgtcggttgtaaattaccgattaataggcgcaccaaagttgttttgccaaccccgtttggaccgattaaactcgtcatgctaccacgtttgatcgtaaaactgagatcttttagtacttgtcgattactaaaggcaagccctaaatgttgtgcattcactaattctgtcattttgaatcctgagcctttctaactgcatcaaattgctgttgcatccatgttaaatatgtttttttagcgggtagtgtttcagttacttgtacaactggcaccccttctttatccgctagttcgtgcatttgtttaataatgggactttcttcttgcttattaatcactaaaaaggcaatctgatgggttttaattaaatcccgcatcgttgtaatatcttttggtgatggatcggtcccatcttcaattgctttggcaaagtgttggttagcgactttgtaacccatttcagccaatgcatagtcaaaaacgggttcactaacagccacttgttttcctttggcctgcgcctttagttgttggagttgtgcgtctaacgaagctaactttttaagatacgccgcaccattttgctgatacgttgccttatgtttcggatcgcgcttgctaaattcagtcactaatcgcttggtcaatgttggcatcgtctttaaatcataccataaatgttcgttagcgccattagattgtttcattaattgactgactgtcaacacagtttggtcatctggttgggcactcttaacgactttgtttaaccagctgtcgtaaccaagcccgttttgaatcacaatatccgccttagccacgagtttagcatcattggttgttgcttcgtatgaatgtggatctagactgggactattgataatcgacgtcacgtgaccttgattacctaaaaccgcttgtgcagcttcaccataaaaatcgagtgacgatacaacttgaatcccactcgccttttttgtactctgaccacaaccagccactaatagcattagcagtaagattcccgccatgattcccaaaccttttttacgcatctttttctcctcttttctaaatcgtaattattacgttttactaaaaatattttacacgagtctcactaattgtcaatcatttttctgaaaacacttaaaaagggattgggacaaagattgcttttgccctaaccccttttttgaattgttgaactttaaacgtgttctgtaagtcattctcctccggttaaccctgagtcgcaaacaattactgcgtaattattcacgccctgtgttaatcctcggagcatcgacttaagccacactctttaattaccagatttgttccactgcacctgttgcttggacaacaaaataacctgcccgtggttgatcttcgtttggtacgtaaatattaatgagatagccttgttgcccaccgcgtgtgattaagccattattcaaatacgatgcggtttgaccaaattgtgagccaacttgttgaaccaccaatttaatcgcttggttgccatctacggcagttgtttgttgtggtgtcgtggtagtcgttgttggtgcactgctgctagattggctcgcagattgactactgctacttgccgttgtagcagttgatgatgattcagcaacacttgcagttgatgaacttccttgtggggactctacttcagttgaagatgccatcgccgctttggagctcgcttttaattggcttgcactacttgaaagttcactttcgcgttttgcaacgctactttcacgtgctttaagactagccgtggttgaactttgcttggcatcagcatcttgatttgccgtactactttgaccacaagcccctaataatagtagtcctgataccaaaactgtactaactgtaaccatctttttcataataccccctccaactcctattgattcatctttattctacgagacccacctcagaatagcaattaaatccacatctgatttaaaaatctttaagaaacacgctgattagcttaacttagcagccacttgcttggcaatcaccatatcagttgggtatggtgtatcgaccccgcgtactttctgataagcatcggcccctttagccgctaagacaacaatttcgcccggtttactttccgtaatcacctgttcaatcgctgttgcacgatcaatttcgatggtggttgtcaccttatcctggtcaatccctgccaaaatttcagcggcaatggctgctggatcttcaaatcccggatcatcagtcgtcaaaatggcccgatctgcatattcattaaggacctgtgcaaacccagcacgtctagaaacacctttatcgccaggactaccgacaacaactagtaggcgtggttgattgtattccttttgcaagaagctcaagagcgccttcatgctggcataattatgcgcgtaatcaacatatacttgaccatgtcctggaacggctaaggtttccatccgtcctggaatctgcaagtcgcgaattccttgttgagctgcgattaaatccgcccctgccaaaccagcaccaatcactgcagctgtcgcgttgctttcattgaaatccccaattaaacgcagttggtaatcaccagaaacaccaagttgaatggctcgttcagaagccgcggtaactttaaaccgactttctgctaagcccgtttctagattttcaaagcggaaatcaaccgccacgggaattgtaggttgataatccgtttcggcaaataagtaaattgattccggagcagtcgtcgtagttgctgcagcatacacatccgcaaaatattgtgtttgcgcgttaatcacacagtgtcgtgagttgaccaataattgtaatttgcagtgtaagtaatcttcgaaattaggatgttcatttggtccgacgtgatcaggtgaaatgtttaggaaaaagccaacatcgaacgttaagccgtacactcggtttttcttatacgcctgtgacgaaacttccatcactaagtgcgtcatcccgttttcaactgctttgcgcatgtcgcggaataaatctaaactttctggtgtcgttaaatccgatttgaagcgatcctctggtttaggccctaagacacgatcaattgttgaaaataatgctgttttttgacgggtcgccgcttgtaaaatcgattgagtaaagtaggccgcagttgtcttgcctttggtcccggtgtaagccacgataaataaatcatcttgtgggtaatcataaaaagccgctgataaaaccgccatcgctttttggacgttcgtgacgattaaggcgttcatcccgttgccttcaacaatcgcttgttcggcaacatatgttacggcccctaattcttttgcatttgttaaatagacgggacgaaaattccctttacagaaaaagagcgtatcctcagttacctgccgtgaatcatacgcgatgccggtcatatttaaagtcgggtcaccattaagcgccacacttttcaataaatgatgctcttttagaattaacgtacatgcatctaatgttaaagccattttcgtcctcctcaaaatccttgtgaatggttttaattatagcacgatttaatcatgctgcgcttgaaacggcttataatcgtagccataaaaaaacgcgccaccgttaagtgtcgcgtttcaattccaactaaaataggttcgtgaaaaattctttgatcccttcaccgattaaaacaaataaattggctttggggtccgccgttttagtgcgtaattgtgattgtggcgcttgtccgatataccgcgtagtgacaccgttcaattgtggcatcacttgaccaatttgcacattctttttaataggtgcttccaattggcgttttgcaccacctttgactgcttggtaatgccagtcaatgttggctgctgtggttccttttggcacccacattgaaatagctttgttcgtaatcaattgcactgtcttttggcgaccatatttaaccgtcgctgtcttataaggtgcgagactctgattggcttgtgccaattgtttttgttcccaaccatcgaagacatattgcattaacttgttagtttcaatgaaccgccggccagtatcttcaccattggcatgcatcaccactgttagaatccgttgcccatctttcgtcgcagttccggtaaaacaatcgcccgctttgtccgttgtcccggtttttaaaccatcgaccacgtagtcttgcggtgcattattttcgccaggtaacattaagttccacgttgacatggccgtttcatcacttgtttgggcgccaaatgtaaaatgcgcttgcttggttgtttcgagaatttcaggataatcagccaacaacttttgcgctacgagtgcgacatctgccgcactcatttcattttcagcatcagccggactgcctggataaacttcagcgccgaggaattcattgttcaagccggacactgaataaagttgtgcgtcttgaatgccccaatccgccactttttgccgcattaaatcgacaaaatccttttgtgaaccggccacttggttggcgagcatcatggctgcatcattcgccgaagcgaccatcatggcttggaaaagtgccttgacggtatattgtccgtccgcttgtagaggcacattcgttaaatccttattttgactcaattgataaatgaggtcatcgggcttcaccgtttgttcccacgttaacttaccttgcttaatttgcgctaacacgatgtaggctgtaatcatcttcgtcatcgaagcgattggcaacgcctgatccgcattttgttcgtataagacttgtccagttgctgggtcgagcgcaattgctgcactcgcatcgatttgaggggtggtcggcaaactcaccggcgtacttgccgctgcaactttggtagtctgggcactcaaaagaccgccaacgggtgcaattgccaataggccgaccattacatattgtactaattttttaaacacaacattactccttaactgattttgcgccagcagtttgaggatcaatccgccgacctaacttcaaaggtaagtgtatcacaaaactggttaattctggcgtcgaatcagcataaatataaccgccatgtaacgcgacaatactttgggtaattgctaacccaagtccagtgccacctgtttcttgtgaacgcgatgcttcaacgcgataaaagcggtcaaagagttggttcaatgaatcacttggaatttgttgaccatcatttgacactttaataatcgcctcttgaccgattttttcagccgccaacgtaatttgtttgccacccttgccatatttcaaagcattagcaattaaattattgaagactcgaccaagcttttcagtatcggcttccatcatcagtggtgcaggattacaagttacattaatctgcatccccttcttattcgcttctaactcaaaactggccgctaattgatctaacatctgctccatatcaaacgttgtcttggtaatgggagtcgatgtttgccgcaccttcgtgtattcaaataaatcctcgactaaaaccttcatttgttgcgccttcacgaaagcagtatgcgtatatttggttagttcttccttggtttgatactgattatcttcaattaaaccaagatatccgatgattgaagtcagcggcgtccgcaaatcatgactgacattggtaatcaattcgtccttactcttttcaatcttgcgttcttcttccattgaacgcacagtactatcaaccagcgtgttcacactatcgatcacgcgttgcaaatcacggttgacacgcaaattaatccggtggtccaaatgaccatcggcaatgtaatgcaactcaccaatcacgtgccacatctgcatttgatggtaacgccgaataagccgccaatagacgactaacacatcggcaacccccatcaagatgacaaaccaattttgccaactccaaatatgccattcattcggaccaattgtaatggcgtttttaatcatccatacgccgccgcttagttgcggattattcacaatcgcctgttgtaacagcaccatgattgataaatttaatagtaataacaaaataaccgtgatgataccctcggcaaagagttcgctcttttccttagcggttagtgccactttttgcaggttcttttctccttgatagtcagccattaaacttctaccttatacccaacaccccagacggtttcaatcactttttcaccatcggttgcttcttcaattttgtcgcgcaaatgacttacatggaccatgaccgtcttggcagagacgatactttcttgtttccagacccgttcaaaaatatcgtccgctgaaaagacccggttggggtgactggcaagtaagtataaaatcccaaattcaagtgcggtgagttggatttgcttgttattaatcgtcgtcacttcatgtgagtcgcgcttaatgataagcggaccaacttctaagacatccggcacttcgttggccacttgttgttggctccgccgtaacaatgacttcacccgcgccatcacttctaatggattgaatggttttgaaacgtagtcatctgcaccggttaggaggccttgaatcttgtccatatcagttgtcttggcagacaccacaataatgggcacttgtgaatccttacggaccgccttaatgacttcgataccactcatattcggcatcataatatccaagatcatcaaatcaatatcgggattcgtggcaattttagtcagggcttctttacccgtgaaggcttgaatgggttcgtaaccttcgtttttaacataaatacttaataattcaacaatttctttatcatcgtctacaattagaattttcataatcgttacctcgtttaatttaacatcattttgcatgattcgctttcattgtaacaaactatcttctacttagagttaaagaattctttaaatcctccccatcatttaaccacaaaaaaaggatttaagtcgtgcaaaacgctcgacttaaaccctgatagaaatgatttgaattaacgtgctgaatagttaggtgcttctttggtaatttgcacatcatgtggatgtgattctgtcaaaccagcatttgagatttggacaaattgtgcattatcttgtaggtcctgtaaattagcagcaccaacgtagcccatccctgaacgtaagccaccaagtaattggtaaattacatcgccgagtgcgcctttggcagccacacgaccttcgatgccttctgggactaacttgttggcttcattcacaccactttggaagtaacggtctgatgaaccatgcgacatagcagccaagctgcccatcccacggtatgttttgaaacgacgtccttgatagatttcaaattcgccaggtgcttcgtcagtcccagctaacatactaccaagcatcacaacgtttccaccggctgcaagagctttaacgatgtccccagaatatttaatcccaccatcagcaatgatggttttgccatattcgcgggcaacactggcagcatcgtagatggctgttaattgtggtacaccgacaccagccacaatccgagttgtacagattgaaccagggccaatccccactttaacgacatcaaccccagcatcatacaaggcttttgtgccttctgcagttgcgacattcccagcaatcaaggttgcttcagggaagcgttcgcgaatttcactaatcttacgtaacacaccagctgaatgaccatgcgcagtatcgataatgatcgcatcagcccctgctttcaataaggctgcagcccgttcaaaagtatcgcttgtgacgccaacagcggcagcaactaataagcgaccatattgatccttagccgcattcgggaattcttgcactttttcaatatccttaattgtgattaatccggctaagcgaccgtcatcaccaactaaaggtaacttttcaattctgttttgttggaggatttgttcagcttcttctaaagaagtgccgacaggtgcggttacaagtgcttcgtgcgtcatcacggttccgatttcagcagagaaatcagagataaaacgtaaatcacggttcgtaataatgccgactaattttagatcatcgagatttgaaacgattgggacaccactaatacgatatttacgcatcaaatcttcagcagcactaacgggtttatccgctgttaaataaaatggatcaataataacgccattttctgaacgtttaaccttcaagacttcatctgcttgacgttcaatactcatattcttatgaatcacgcctaaaccaccttgacgcgccatagcgattgccatgggtgcttccgtaacggtatccatgctagcactcataattggtgtgtttaacttgatattctttgcaagttgcacccctaaatcgacttcgttggggagtacatgactctccgcaggtattaataaaacatcatcgaacgtaaaccctttttttgtaaactttgattcccatgcagacataatcttcctccaatttgtgaactaaattaaccgccgacccatcgattgttcgtattatctttaatcgataaccagtttaaaatttgataaaatattagcagatttttctgcaaacgtcaataaactcttattgaaaattcattttcatcaatatcgtgtacgaatgaatcacgaacatttaaaataagggtgcacaccacccagcttcgttatacaatagaaataactgattataaaggatggattggcatgcaagaacaacaacgggttctagatttaacacgaagttataacctacgcgaattaggcggttaccaaacggttgatggcaagtccgttaaatggcacaaattattacgttcaggtagtttgaacgcgctaaccgcaactgatattgaggatctcttaaattacggtgttgcttacgatgtcgatttccgttcacgtcatgaaatcaaggtcgcccccgacccatttgatgacaaccaactaacctaccatcgtctttcggtatttccattcactgaccaagccgatacccctaaaaagccagccaaaaaaggcctaatgcggctttttggtaaaaaagaagctgctactcccgaacgatcaagtatggaccggatgtaccaacaattggtcaccgactcccatgctcaagcagcttatcgcgatttatttaccgtactattaaataatcacgatacaaacggtgcagtcctttaccattgctcagccggtaaagatcgcaccggtgtcgcaacttttttaattctaagtgctctcggcgtcgactggaaaacaatcgttgccgactatgtcctctcaaatgaggtcctaggactcagctcagcaaccccaacccgaatttcaagtaacgatagccaggtcgcttcaatgaacgctaagagcattacacaggctaatctagaacttgtccgcgacacggttaatcaagaatacggcaacatcgaaaactacctatcaaaggcaatggccctcaaaccagaagaaatcaaacaattaaaagaggactacttagaatagcgtgcgactgcaaatggttgtccgctgaggattagcctaaaaaggcgaacacaagcaattgtgttcgcctttttgaatgatcttttaatgactcttaatataatttttgccatccgctgctggtgcgacggccttgcccaagaaaatcaccagaataataatcgtaatcgcgtatggtgcaatctggaaccagacactattcacaccggccagtattgggatgtagccgccgataatcggcaaactttgtgcgagtccgaagaaaatcgatgcacctgtcgcgccaattggatgccacttaccaaaaatcatcgccgccaatgccatgaagccctgacctgaaatcgtcgctgcgctgaagtttaacgtaatcgactgcgccatcaccgcgccaccaatgccgcctaacaaaccagacaacatgaccccgatataccggtaacgactcacattgatgcccagtgtatcggctgccgctggattttcaccgactgaccgcaagcgcagcccaaatcgcgttttatacagcacataccaactgataatgccgaccaaaaccgcagcgtaagccactaacgacgtcttcgtaaataaaatggggccaatcactggaatttgggccaagccggggaatgtgaagttaccgatgctttgattaatcaccggcgtttgccccttaccgctatacagcacacgggttaagaagacacacaatgcaggcgccaataggtttaacaccgtcccactaataatgtgattagcgcgcaatgttacggtcgctaaagcatgtaataaggagaacagtgcaccaaacagtccaccaaccaataaggcaatccacggcgtcaatccgccaaaaaccgtactaaattgaagggtaaagacggcactgctgaaagccccaacaatcataatcccttctaaaccaacattaatcacaccgctatgctctgaaaaagcaccacccaaggctgtaaaaatcaatggcgccgcgtaaactaacgtggtcgcacaaatcgtcattaaaatcattgtgattgtcattatttttcaagcctctctttcatcaacgcgtgttttttcagtaagcggtgattgagtaattgttcaaataagaagcgcacacccacgaagaagataatcgatgcaatcacgatattgacgatttctgtcggagttgttgagtagacggaaatgcttaagccaccaatctgtaaagcagagaataaaatcgccgcaaagataatcccgattggatgcccattcgctaataacgcgaccgccattccattaaagccgatatctggtaaggcatttgaaacggaaatattttgataattccctagaccatcgacagcccccgctaacccagctagtagtccagataatagcattgcccacataatcgtttgtttcgtattcatccccgcgtaacgtgcagcttgttcgttcaatccaactgccttaatttcaaatccagtcttcgaccgtttcaaataccaccacatcacaatcaccaagactaacgcgatgaaaaagccccagtgaaacgttgagtgattggtaatctgttccaaaaaaggggtccgcaagcttgctttagggacaatgttggccgatgagtcgctgtcttttggcgccaaccaacgtttaatcgcaaaattgacgaaatacaatgcgatgtagttcaacatgatggttgtgatcacttcactggtcccaaagtatgcccgtaaaaaaccggccaaccaagaccaaaagccaccgagcagcatccccgctaaaatcgcgccaagaatcaagagaatccccggtaaatttttaaagtggagtgcaaagacaatcgcgccaaaccagcccactaatagctgacccgacccaccaatattgaaaaagccggctttgctcgcaattgaaaagccaagggctgtcaaaattaacggagtcgcattgcgtaatgtctcgccaatcgaatagatatctccgaatgcgccattaaagaggttactgtaattttgaataggcgaatatccaaaaaccaacatcacaactccgcccactaacagtcccgccacaacggataggattgcaatgattaatcctgaagattgttgtttattcattcgtctcgccctcctactggttgttgcccggccattaataatccgagcgtctgactcgttgtggtttgtggatcaacttcaccaacaatttgaccggcgtgcattacaagtactcggtcagctaactttaaaatttcatctaattcaaaactaacaagtaaaatcccacagccttggttccgttgttcaatcaagctctgatgaatatattcaatcgcacctacatcaacaccgcgggtcggattggcagcaatcaagacttttggttgtttggcgatttcgcgcgcaaccaccactttttgctgattgccacctgaaagttctccggcaagcgtttgttcagattgcgtccgaatgtcgaatcgtttaatcagtttctgcgccgtttgattgatcacccgataattaagccagcctagatgactatacggttgatggtaataatccttcagcgctaaattttcagcaatcgacagtggcaaaatcaaaccgatattctggcgatcttctggaatgcaccctaagccttgttcactaatttggcgtggtgtccgtttcaataatgactgacctcctaattcaatttttccagactgcggttttaattgtccggttaaaacctgaattaactcactctgcccgttgccatcaatcccagcaattccaacaatttctcccgcatgcacggtcaatcccagatcatctagaacagtgcgtttagcaacacgagcagcgacatgttccaccgatagcatcacagcgccttgattagccattttcggtgtgggggcttgttgcggacggccaaccatcatttccgctaattttgtcggatccgtttgtgcgactagtaccgtatcaatcacacgtccggcacgaatcacgacgcaccgatcagcaacttgtttaatttcctttagtttatgcgtgataaaaatcaacgacttcccttccgcctttaacttctcaaaaatggcaagcaaggcttgaatttcattcggtgtcaaagctgcagtcggttcatcaaaaatcaatgtcgttgcttctcggtaaagcgccttgataatctcaacccgctgttgcatcccgaccgaaatatcagcgatttttcgatcaaggtcgagcgccagttggtatttatcgactaaagccgtgaccttttgccgcgccgttgcatagtcaatccgtccctgtttagttggttcgtcacccaggataatgttttctaagaccgtaaaagccggaattaacatgaaatgttggtgtaccatcccaatcccgagggcttttgcatgtcgagggccatttaaggtcactgcttgtccgttcaccagtaattgccccgcagtcggctttaattgtccggtcaaaacacccatcagggttgatttccccgcaccattttcaccaagcaaggcaaggatttcaccctgttgcaaggttaatgaaatatcatcattggcggtaaaggcgccgaaccgttttgtaatgtgctgcatttctatcacagtttttgccatttttacgctccattcattaagcatacaaaaaggatggctgataactgctgccatcctttagcattcaatagtcgttattctgcagcaactttaatggtgcctgcttcaattttttgttgatattctttgactgcttgccatgtttcaggggaagcattgtcgttcactaaggcaacgcctttgtctttcaaatcatatgtgacggttttgccaccagggaatttatcattcttagcttggttagcaagatcttccactgctgtgccaacttgtttaacggcagatgctaatgtgacgttgccaccatcatatttcccatcggctttttgatcttgatcaacaccaatcacccagactttttgaccacccttagaaatgttcttagcagcggtaaagacgccagcgccagtgccaccagcagcgtgataaataacatccgcgccgttgttgtacatcgcggttgccaatgattggccgacatcggctttcgtaaatgaaccagcatatttcacatcaacggtgattgctgggttaacggctttcaccccttgtttaaaaccagcttcgaatgttttcacgacggcactatcaattccaccgacaaagccgactttattcgtcttagtagttttcgcagcggcaaccccggctaggaatgatgattgttctgttttaaaattgacggacgcgacgtttttccgattcttaacgtttgaatcgatgattgcaaagttaacatttggattattctttgcagattggctgaccgcgttatctaacttatagccaatcgcaaaaatcgtttggtattttgccttgattaacttattaatgttcgggaaaaagtccgcatcagaactcgattgtgcgtaattgtaaccattgaccccttttttaagatcatgactagcaccccatttttccaaaccttcccaggcagattggttaaaagatttatcatcaatcccaccaccatcagtgactaaagcggctgtgtgcgttgctttctttgatgctgtcttttgactcccgcacccggctaacacgccacctaatacaaggactgtcgagaaaagtacgaccaaactttttttcatgaaataagcctccgtcaataaatttgataatttattataaacacgttatcgacataaaatcaatacattgatttcattttataaaatattgttcgtttatattgtatttgttgctaagaaatatagataatgctaatattaattgataactaacgaacaatcaggaggcgaaccatgcaaacacaagtctattttaatcacgatggcggtgttgatgatttgatttcattaactctgctcctacaaatgccgacaatcaaactacttggcgtcggcgtaattggcgctgattcatatgtcgaaccagccgttagcgcgagtcgtaaaatcattgatacgttttcagatcaatcagcgcggttagctgtggccgcttctgactcacgcgcagtccatccttttccaaaagaatggcgaactgacgcttactcagtcgatgcacttcccgtgctcaatgaacgtggcaccgttcaaacgcctctgagtcctgaagccgcacatctcgatctaatcactaaactcaatcaagcaaccgaacccgtcacattgctctttaccggcccattaactgatttggcacgcgcactcgccatcaatccaagcatcgaatataaaatcgctaaacttctttggatgggcggttcttttcttgaacaaggcaacgttgctgaacccgattctgatggtactgctgaatggaatgccttctgggatcccgaagcagtgaaaactgtcttcgatacacaaatccctattgaattagtcgggctcgaaagtacgaataatgttcccttaacgccggcgattcgccaacgttgggctagtaaacgtgccaatgccatgatggactttatcggcacctgttacgcctttgttcctcaactggtccatttcaaaactaattcaacttattatttatgggacgttttaacaacttgttaccttcttgatccaacaatcgttaaaacaaaagccattgtatgtgatgtcattccaaacggaattgccggcgggcgcacgttcttaactaaaaacggacgtccggctaaactcgtctacgacgttgatgcagctggattttttgatctaattgaaaccatcataaaagcagactaacgcaaaaaggagcaccgacttatcagtcagtgctccttttttgaacgtgctttcatcaacagcttcctgtgctttgctacacttagcaaagcggtgcttgcagcgccaattcgctaagttaggcaaatgctcagaagctacccgttgatgacgcactccttttttgaacgtgcttgctaaactaggggaacaactttgtaaaggggctgtttgaatgacgactgatttcaatcaagaacaagcgcatctatccactgtttatcaacaattaaccaccactttgacggccatcaatgatgcccaatcgcaaaaccagaaaaacggcaacaccatcaaagcgcagatcaccggtgaagccaaactcaatttcgattcatacgctgataatcttgatacattcgctgctttagaaagtatcaacaaggaaatcgatatgctcaacctgaaaaccgattcgctcgttgcacgtcatgatgagaccttacggctgttagagcaaccctactttgcaaaaatcacgctgacttttcctgaggaaatagacgccgaagatttttaccttggttcagctagcttcacaaaccaagccggcgatcctgtgatttacgattggcgttcacctatcgccgatgtttattaccagcaaacattcggccccaccagttatcaagctaacggtcgcgccattgcggtcaatctcgaccgacggcgccagttccaaattcaagctgatcagctaatcgatttctttgatacgcagattgccatcgaagatcccttgttattagccactttaaaagaagccaaaacaacgcaaatgagcgccattaccgcgacgattcaaaaggaacaaaacgcgattattcggcaacaaacgactgaccatttactcatcgatgggattgcgggcagtggtaaaacatcggtcatttttcaacgcatcgcctatttcaagactatatcgcccaagttttaccagacttaggtgaacaaacaccagtcaacttaaccctacaacaactattggcgcaattgttaccttctgatctagccgcactccccatcgctgatcaaccagctactttgaccatcacacaattaacgttgcaggcgagcgatttccaatctttaagccctggtttaccgctgacgattgatgccgcaacaagctaccaattcttcttaaaaacaccggtggataccccgcttgataaacgaatacaagcaactcagcaacaactcacaagttgtctacaggaaagcatcacaaatgaagcccaatcagcagatgctttaactcaacttgaaagcctcactgaaaccgagcaacagcgcttattcgaccgcttaattcgcgaagatgaaccactagcaccgctagcacgcaaaatgattcgtcatgattaccaagacttagctgatcagctaagcggttatcaatggcttgcttttgatcaaataattgcccgtcaaacaccgattgatgctgttattgcagctcagatttatgcttatttaacgcatcacgtcttcccaaacgttaagcaggtctttatcgatgaagtgcaggactatcacgcaagcacgttatctctttttaaacaacttttccccaaagcacagttcacggttttcggtgatcagcatcaaagtatcaccccgcataaagtacaattcgaacaattacccaccatttttccacaactacaaactgcggcactgcgcacaagttaccgctcatccggtgcaataacgacgttatttagtcaactattcaccgatttaacagatgtccatgccgttcaaccagcaggcaagcggccaacgacgatttgtgcgactgattttaacgactacctcacccaaatccaagctcagattgaccaactaccaactgaccaaaccttagccatcatcacgcctgctggtgactttgacgagcggttaactggcctcaaaaatgtccaccacttatccacagaaacgacgaatctccccgaaaccggcgccttcactttaccgctgacgctggctaaagagttagaatttgataacgttttgttgtacgatctgactaacaattattataccgagccaactgtcggccacaaccgcctctataccgccatttcgcgggcaacgcatcaattgacgctcagcgcactgggcaagttgccggttgaattaaatggccaataaattggtcatttgactgactaggctagtcctcaaaatataaacgctcgctgtcgcactctattcaaatacaaactgattgttgtacagttcggcgtagaagcctttttcgtctagtaattcttggtgactgccttcttcgatgatgcgaccgtctttgaggacgataatgcgatccgcattgagaatcgtctttaaacgatgggcaatcacgaaactggttcggccttggatgacgttgtccatcgctttttggatatgactttcagtcaccgtatcgacgttacttgtcgcttcatccaaaattaagagcgctggaccggtgataatcgtccgggcgatactgatcaattgtttctgaccggtactgaagatgttatcttcttcactgacagccgtttgataaccatcatctaacgtcatgatgaagtcatgaatgtgggcttgctgggcagctgccaccacttcttcatctgttgcatcgggtttcccgaagacaatgttgtcgcgaatcgttcctgagaaaagcacggattcttgcaacacgatgccgacgtgcgagcgtaatgcatccaaatccatttcacggatatcaatgtcatcaatcttgactgcgccttgatcaacatcatagaaccgattcatcaagttcatgacggttgtcttcccagaaccagttggaccaaccaacgcaatcatttggcccttatccacttcgatattcacatcatgcaaaatttgcttacctggtaaatagctaaagtcgacatgttccatggtcacggagcgttcaatgccctcaaattgcacaccgtcggttggacgcacttcatcgtcttcatcaaacacttcattcactcggcgggcaccggtaattgccaattgaatcatgctgtaactcgatgaaagttgtgcgatctggttatagaattgttgtgaatattgaacgaatgttacaactaagcccaaagcgatcgactttttaatgtcaccgttcaccgctaaccagctaccataggaaatcacaattgcggtattcaccaacgacatcccttgcatcaacggaaagatcatcccagaataaatctgaccttttaaagtcgccttgcggacattttcattatgttcaatgaagccatcaatcgtttcttcttgaaggctgttagtaataatcactttttggcccgtgattttttcgttaatgtagccattgagtttcccgacttcatcttgttgcacattaacgtatttttgcgctttattaatgatgatccaagcaaggatgaatgaaattgggacggaagcaattgtcacccaagcgagctgcacatcttttctaaacatcataatcaataaaccaattaagagcgccgtgcctgatacaagttggctcaacacttgattcatcgcattgtaaatattatctaagtcactcgtaaagcggctgagaatatcgccatctgaatgacggtcgaaatatttaatctgcattttttggagcttattgaataacccaatccgcatccggttggttgataacgcgttgacgcgtgagaaaaccgcgcctgataccaacgtcgctgctgaactaaagacgtagaataaaatcaacgatacaatcacctctacgaaggcgtctttagatgccccactggttggcaaatgttgggcttttaaaatttgaaatttcgttgcatatttgactaactcattgagcgcgtccccgatatattcgggtgctttcacctgaagataagtcgccatcacagtcatcacgaggatgattgcaaaagaaggtttataccgctttagataatggaaaaagaacttcattgctcggttaaattctcgcattggttatcctcgctttcctttttgcgtttcaaagatttctcggtagacatcactggtttcaagtaattcatgatggttaccaacaccgactaaacgaccttcatctaacactaaaatccgatccgcgttgaccacagatgaaatcttttgcgcgataattagtgttgttgtgccagctaattcacggtctaacgcctctttaactaatttttcagaccgggcatctaaggcactagtactatcatccaaaatcagaatcttcggttgcccgattaccccccgtgaaattgagagccgttgtttttgaccaccagagaagttcgcactgcgttcttcgacggttgcatcatattgatcagcaagcttttcgatgaactctttggcttgggcaatccccgttgcgcggtccatatcggcgtcatccgcatcttttttcccgtgcttcaagttttgtgcgattgtgccggagaataaaatcgctttttggaggacaaatgaaacggcgctgtgtaaattatgttcgtttaaatctttgattggcacgccgccaattttaatctgcccttcagtcggatcgaacaagcgcggaatcaattgcgccatcgttgacttaccggccccagttgcgccgacaatcccaatcatttcaccagcgttaattttgaaattaatatctgttaacgtgttacgatcgtcttctggataacggaagctgacgtgatcgaattccaacgtccccgctaagtcttgatcagggacatctggataaacgatatcaggctctgttgaaagaatttcttggagtcgcttcaacgaaactgccccacgagatgccatcatcatcatcatgccgcccatgatgatcgacatcatgatttgcattaagtaattcataaatgaggcaatcgccacaatcgcttctggatccgtatcgactaagttcccaacgaaatagattgatgcgacaaccgctaagttcgccaccaacatgaacgctggaatcattacagaaaaaagcatcccgacgattgtcgtatggtgttctaattgattgcttgtttttgagaagcgactgatttcgttatcttcttggacaaaagacttcacaatccgcgtgcccattaaattttctttagcgaggttattaatcttatcgattaaattttggatggcaccgaagtgtttccccatcgaacccattgataagaatgtaatgatgaagaccgcgatcactaagagcacgataatccaccataaactcggaatcgaattcatcgcaaggatgaaactgccgacaaataaaatcgggattctaaaaatcgtttggagcgtcatcataatgacgttttgaacctgggtcatatcattggtcaaacgcacggataaattcccaactgagaatttttcaatattggcaaatgagaaagtctgtatcttccggaaagtagtttcccgcatatcggcagtcattccctgcgccgtcatcgccgacgtaatggtgttgaccacgcccgcaattaaaccaaccacggcaattacaatcaaataaattccaatttgacgtaccttatcttgatcgcctttcataatcccttccaaaacatcttgtaatagttttggttgccatagtgaagacgcaacagaaataaccgtcgctaaaatggaaagactaaacacgccccaataaggctttaagtgctgtttaagtatcgacatgagcatccctctttttctgtagttgaatctcctgtacaaatcctgtacagtataatcgaacagtgttcgagttactactttatcaaattttaaaacgaattacaatcatcttttcataaaaagtgaaggagcttcattaatatggtaaaacagtcaatctctgccgagcaaatcatcactgccgcgtttgaaattttacaagtatccgggaccgtcgatgccctttcaattcgtaaaattgccaatcaattagacatcggggcggccacattttactggcatttcgaaaacaaacaagccctcctacaggcgatggctgataacattattcaacaaattgagattgagccatgtaacacaaccttagaatggacagaccaaattcgccaaatttttagcgccatttacaccacttacatagcacagccctatgccgctgagttgatgatgcggaccgtccctgcaactaaggcccgcctaggtcttatcaaccacttaattcaaatccttttggatgccggtttcacgccagaacaagcaagcctagcgattgaatccatcgatcacttcatgtccggtctcttcactgacatcaccggtgagcttgagatgaaacatcgcgtctcacaacataaagacacttatcttgcacagttaccgcttaaaatgcagcagattgcgactgacaatcattacaatgctttcttaaaaacttttgaacatcatcggcaccaacaacaacgctcactggaaaaattcatgctaggcctcgatattttcctcgctggtttgcaacaacaacttgcttaaataaaaagcgcgcagacaactgattgtctgcgcgctttttacatttaaactgcttttgaacgaatcccgaatccataactcagagccatcacgccgacaatcatgatcatgtataacggtaatcgagtgttcgatcccgtatgcaatagactcatgccgtacgttaaggcgctgattgcgaggtagtagccaaaactaaacaacccgctggccgtgccgatcacatcttcgtaacccactaacgctaaattcaagaccaccggtaaggtcgtattcaatccccacaagaaaagaggccgtgggacgacctcttcttttgtgggtttctagctttaacgcgctttttgaaactgacttctgtgcttagctccaatccgtaaacaatcgactacgtcgctcatttacagatttaggctagtgctcgaagtcaaaacgtttcaaacgcgcttctatttctttaacgtgcttttaattcgcaaccttctgcgccttgctacatcaaccagacaatcgcccttggcgcttatccttctgattaggcaagtgctcaaaggctaaccgcgaattaacgcactcatttttttaccagcttgcttttttgacgcctgggatttggcctttatgggctaattcgcgaaagttgatgcggctcataccaaattgccgcatgaaacttcttggtcgaccatcgattacatcgcggttccgcaatcgcactgggctagaatccttgggtaattgagaaagagctaagtaatcgccctttgcttttaattctgcgcgcaagtcagcgtatttcgctactaatgcgcgttgttttgctaattttgccacttttgatttttttgccattgataaaactcctttttaccgtgctttcaaaagcatcctgttccggttagctacattagccaaacaatcggttacgccgctaatttggctaattaggctaatcctcacaggataaccacttttgacgcactcattttctttaacgtgcttttaattcgcagacttctgcgcttagcaccgtgaatcaaatcatcgacttcgtcgctaattcgcttccccgtactaatactcaaaagttgattaagcttgaacgcacttttccccgattgaaatagcctacgctaactatttatgaaatgcaattaaaaagacttataaaaagtaaccatttttcaacactggcctgtgctatacttaatctaagttgatttcacagaaaggggcactttcagatggcccaaaaaaacattctccaatacttaattctcgggctgttaaatcagtctcccaaaaccggttatgatttaaaacgcgtctttgaagatgatatcggtgagttctggcaagcccaacacagccaaatctatcctgaactcaagcgactcgaacaggctgatcggatcacccacgtcgaattgatcgccggaacaaaattaaaaaagaagcagtattcaatcactgcagatgggattgccttttttgacgagtggcgatactccccaaccagcgaaattattgccagcaaagacgaatttattttgaagctatactttatcgactcaaaaaatgatgctcatttagacgcaatgttcaccgaacaaaaaaacttacaccaagccaaactagatcacctactcgaccggcgtcaaacccttttcagccaacaagctgcggtggatgcgcactatggtcattatcttattttagaacacgcgattaaccgcgaacaagactatcttaattggttaacaaccgcacggccgtaaaatcgacccttaacaaatttgagataagtgctatcctattagtaagaagtaaatcaagttaggctgtttcttcatttgtatacgttataataacgcgcttgtacaggtggtcagttgaccaattgtatgggcgctttttttatttgatccagcaacctagactttaacaaattcaggaggaatattattttaaagcgcaagaatgttgataaagtcgtcttcatccccacgatgttactgttcgggattgtctccgcatttttaatgttggggggtgacacgcttcagcagtcgatttcacaactacttgatgtgatgacggcacattctaaatggctttacattggtatttatatcattaattttattttcctattttggttggggtgtagtcactatggccatatccgccttggccaaccaaatgaaaagccagaatataacgacttccaatgggggagtatggtttttgcaactgggattgacgctagcatcttaatgcttagtaccactgatccactgcaatacttacagaacccaccatttggcgctaaacctttctcggctgaagcataccgctacgccaacgtctgtgggcaatttcactggggacccatggcatggatgatttttgccaccgcgactgtcgcaattggctacgctctctatgttaagaacttacgggtacaacgtttaagcgccgcaatcgacctattagaaggaccacaaccttacaaaaaaataattcgcaaattaatcgactttaccgttgttttcggcattatggggggcatcggctcatcaatcggaatggaaattcccgtgatttcaaaagtcttgagcacaatgaccggtttgaatgataccatctggcttaaacttgccctcttcattatcttactggtgctattcaccctcacggtatatgccggcttagataaaggcattaagaagctcagtgcttggcatatctatactgccattggctttttattactcgtcttactaatcggtccgacattcaagctaattggcgctgaaggccgcgatgtcttccatctctttggtaacttcgggcgtttaagtttaaatcagactggtgcacacagtgcgttcgcacaacacgaaaccctcttttactggggatggtggttatcttacatgcctgtcatgggcttattcatcgctcggatttcacgcggccgaaccattcgccaagttttattgggaatggcgacatacggcgcatttagttgtatgagcttttacgctgtacttggcggttatgcgctcttcttacaacgttccggtcaaatcgatcttgttcatctattgaatacccaaggacaagccgctgtcatcgcggcggtcatcacgaccttaccgttcaaaattatcatgttagcaattttctgtctgtcatgtttcattttcctggcgacaacgatctcttcttcggccttcatcgtctcatcatttaccagtcttgaattgaaaatcggagaacaacctaatcgttggaatcggatggcttgggtgatcattttcattctattttcacttggaattgtacttgtcggtagtttccaaaccattcaagccgtttgcgtgattgctgggttcccattgatttttgtctgcgcattattgctcgtttcgatttttcacgccgttcatgatggcgagattcccattgaaattgaaaaagaagaaacttctcattttctgaaaaaaaagcttacgccgaaattttttatgtgatacggttatatctgttaacttttcagaaagaaggaatttaaaatgccaaccaataaaaaagaaggtattatttttacaacattaatgtgtttctgcatggtacttggaatgagtatctataacttagttttacatgatagtctatcatggggtgctttgtctaccggtttaattccaggtttcatcgtcgcatttattctagatgtattcgttgtcggtgcaattgctaaaaaaatcgcatttagcttaccattgaacaaagaaaataaattagtcatgattctcacaatttcatgtttaatgattctcggcatggtcacatgtatgtcacttttcggaattctcatcgaaggtggtatccctgaccacttaggtagtgtctatcgtcacacatggttgatgaatgtcatcgtcgcattaccattacaactgatcatcgtgggacctttctcacgcgccattcttggtaaaatccaagcaaacgcagccgcaactgaaacagctgaataaaaacaaaaaaaaacgacgactagcttacgtagctagtcgtcgttttaattatgctaatattttttgaatagccgctaattcttcggccgtaaacgttaagttatctagtgcatgcacactgtcttgtaattgactcaagcgcgaagcaccaactaacacactggctacagtcggctgttgtaaattccacgcaagtgccatttcagccaatgattgcccacgttgttgcgcaattttgttcaattcttgaaccgtactgattgtttgatcaaccttttcaggtgataggaagggactatctggacaagctgcccgcgaatcggctggaatcccgtttaaataacgattggtcaataatccctgtgccaacggactaaacgtaattgcaccgataccttcatccgccaagacatccgttagtccatcttcaatccatcgatcgagcatgttataacgtggttgatgaataataaagggtgtcccgagcgctctgaaaaccttcgtaatcgctttggtttgttctgccgaataattcgaaatcccaatatatagcgcctttccttgttgcaccaataaatctagggcccgagctgtttcttcaattggcgtatctggatctggtcggtgatgatagaaaatatcgacgtaatctaactgaagtcgttttagtgactgatcacagctagcgataatattcttcttagaaccccactcaccatagggaccgggccacatataatagccagccttcgatgaaatgatcatttcatcgcgatagcgacgcagattatcatgtaaaatgcgcccaaagttttcctcggcgctgcccgctggtggcccctaattattcgccaaatcgaaatgagtgatgcccatatcgaacgcgccaaaaatcgtttccttttgagtcgccatcttatcggtttcaccaaagttatgccataaccctaatgaaatcgctggtaatttcaacccagaatgcccgacgcggttatattgcatcccttgataacgggtttctaatgcgtgatacatgtacaacgccttctctactcaagtattttgactatttagccgatcgtcttaattgcgtcttccactaatccccagaacttctgatgatcgagttttacagcgactgatgtgtgacagtctgttggaattgggaatctaaaatcggcgaccgtcatcccacgcgtcaatgttccattgagttcgatatcaacgggcactttcttagtggtcatcacacttggatcaatcacgtaagccacggcacatggatcatgaacgggcggtacatcgaaattttgccccttcttgtacatatcgcggaaaaaggctaacaaatcaaccacgaactgagacgtttcagtatgaatgccttcaatttgttcaacaatatctggtgtcgctaacgcttgatgcgtcaaatccaaaccaaccattgtgacatcccagccggcattgaatacaatcttggccgcttctggatcaaatttaatgttaaattcggccactgcactcgcattcgcttcgtgataaccgccacccattagaacgacttctttaacgcgttcaacaatcttaggttctttgcgtaccgccattgcgatgttggtcaacgcacctgttggcactaatgtaattgtattagctggatgcgtcataattaaatcaatgattaaatcaactgcatgacttttttcaagcgccaccgttggttctggaagaacaaccccgtcaaggccagtctccccatggatatcagctgctactttaatttcttcaattaatggtcgcgaacacccagcagcaatcggtacatcgtgcatgccgatcatggtcgcaactgcgagggcattgcgcgtcactttcgttaacgtctgattggcagccaccgttgtcactgccaacaaatcgatttctggattgccgtatgctaacatcattgcaacagcatcatcatggcctggatcacaatcaagaattattttctttgccattcgtaaaacctccactctctttcacttcgtgcatactatcactatagaatttaagcggtttcaagtcaaccatatataataaaattcaatcatgaaacggagtctattatgcgcattgatactggcgaataccctaccggcgaaaacgccgtccaccctaagaaagttaaacgtttaaaattacttagcaaggttgcaacaatcacctgtattacgatgtatgtttcatacatcccccaaattatcgctaatttttcagggtcacctgtctcacctttacagcccttagtcgcaacaattaatgggtgtctatggaccgcctatggctggaataaaacctataaagattggccggttattatttctaacatccctggcgttattttcggactcgttaccgtaataactgtttatattcactagaattgtttgttaaagccacgatttgcgtcaaataatttttgataactaacagaaaagcaatccatcataagttgcttctctgttatttttttatccctttacccaaacataaaaagccaaggtgattccttcttttatcgaaagaaaaccatcttggcttcactttgaagtaccgactatgggactagtcggccttaagcttgttattttgctgctcgtttaacgtatgtgccttcttgtgtgttgatttcaaggacttcgtcagcgctgatgaaatcagggacactaacgactaaaccagtttccatcgttgcaggtttacctgaaccagtcactgttgcgcctttaatcgaaggttgtgtttcaacgacccgtaagttaacagtagttggtaaagtaaccccgatcacttctgaaccgaagaattgaatcttgcagttcatgttttctaataagtattttaattcagcttcaatagcagctgtttgaatttcatattgttcgtaagtttcaagatccatgaagaatgccacgttatcttgtgtgtataagtattgaacatcttttgtatcaatcattgcttgttcaactttaacttctgggcgcattgttgtttcaacaattgagccagtccgtaagtcacgcaacttaacacgcataaccgtgtttcccttacccggtttatgatggttagcttctaaaactttgattaacttgccgtcttgttcaaacgtcattcctgctctgaggtttactgcttcaatcatgacttgatctcctttatttaaaaaaatattcatctctaactgtaccaaatgaaagccgtttaatccagccctcctgtggtagttatcctatttaatgtcgagtttatgaatcttatccgctggttgtggctcataatgttggtacatcttcgtaatggccaccttaggtaagcctgattcactaatataaatattaggtttgaggtatttcttattttgcacatcttttaagtgataatgttgaatcacttgtttctgatggccagtcggcgcttcatcttgaccatagaattgaatcttggctaatggtaagctaatcgttgcattattaatcttgaaataagcaacatctcgattgctgccaagatacgtcatcttttgttgcttatcagcttgatagaattgctcgatttgcttcatgctgtgattatcgaccagccggacaatcggttgatcacctttgaaaaggtgtaagccatctagcgactggcgcacgttttgagcactcaacatcaaccagacaatcaccaacatactgataaagtacacaatatgtaagctaagactgctagcagcatgattcaaactaaaagtgtagctatcctctagctctttattcatgatttggcgccgaatgcgcattgcaataatcttatacgataggtaccacactacaagcgcgactaaggttgccccaaaagctgtcaaaattgtattttttagaatttctgaatccgtcaataatggactaaagccgctcacaagtttaattgtgagcgcgccaaggattagaatcacaaccatttgtagtacaaaaaaacgggtccgaatacttttgctaatctttgtgggtgttaccactttcgtcttatctcccataccataaatcctcccttgttaacctacttaccattttagcataccgtttccatcaagttgattaaaagtccctcgttggcttattttttacaaaggcatctttcttcaaaggtagctgttcaatatgataaggtgaagttaatcaaacggaggtgtcgatatgttatatccagaaagtttaactcaattaatcgccgattcaaatcagccagtcatctcgttattcattaacttagagactggcggacaagccattaatgcgaacaagattaagctcaatagtttttctaagcaaatccgtgaacagttaaccaccgactatcctgaagaaaaaaccttactcaaccaacttgaggacttactaagtaccgctccccaagaattagcacatatacagtcagttgcgttttacatcacagctgctggtcactacagccaaccccttcattatccgatcacgactgaatattttctaattgctgatcaacccgagctgcgtccactcagttcggaattaagtctgagtctgaacgggaccattctctgtctcaacaagactacttttagtttgaaatccattcaacaaaatgtcattcgggattatcctttacctaaagacgccccaacaaccattgaaattgggattggcacagagcgtaaaggcgaagtcgtccaaggcttctcaagtccaacccacagttttgttgtaaaagaaaatgaacaacttatcgatcaaactaactatttccgcgtgattggccgctatcttgatgacttgctgcctgaaaaagcaccgatttacgtggtcacattacccggcaacttaaatctcttcaaggaactcgtcgttaatccaaactaccggatggatcaagccatccaaacttcccctgattctctttcagatgacgacttactcgacaagttactcacaaatgcgcgtcatgaactccgacaaaaagcgctcggattagcagaacgggccgctagtgcgtatcacggcgattcaaaccttggtgatcctgagattattctttcacgcattaacaatcgccaactaacagcactcattatcccaactgcacttgcaccatcagcaacaatcagcgccgatcaaatcatggatcttaatcacatgatgattgcggccatccaaaccggcctgccattctacccagtaccagttgaaaatattccgacaggactggtggcgatgggaatttaactcttaaaacacgtgccaatacagcaacgtatattcaagcgttgttgtactggtccgtgttttttgagttgcaaatacttgatctagataagctgccagttggtccgttggtaattcttcgtaataggcctccaaaaatggcctgtcgaaaacttcacttgtttgatattgaaaaatttgttgactaacttggtagcccgcatcttttaacacgttttccacagctgggatgatttccggtgtagtgttgggatcttgctgttcaatcccaaaataacgttcaagcggtgtgaacaagtcgtcctcgtttttagtgagccgtaagaatgcacaccactgacggctcttttcgctaatcgtcagtaatgcttgattggcttcgattgccggatttaacgccatccaaattaaatcatagcttttttgtggcgtttgcgccataaagtcagccacagactgctgttgataagcaatctgttggtctggtacatgctgtttagcttcttgttgtgcatactggagcatttgcgccgagatgtcgataatcgtataagcctgactgttttgcactagaggtggcaaataacggccgctaccaccacctaagtcagccactgtctcaacaggcagtaatcgccgatcctgtaaaaaagccacaacgtcagtgacaatcgacacctgtgactcttgttgaatctgatagtattccgctgcaaaatcatcccaaaaagctgcgacttcattatccacagtctatcctccgcttaaacttttattttctcagcttagcatataaaaaagatgccgacaaaataaattatcgacatctttttgaaacgtgctttttggttgcaccaacctccgcttaatctaaaatactcagttgctatccgcgaccgaacacacgcttttttaaacgtgctgcaatcgccatattcttccgttgttaggctaatcctcagaatatctccggcgattttcgcactctttatctcactaccagcactgggattggtgcgtattttgccatgtaggcggcttggctgccgaagtatttagcaacgcccttttgtgatttcgaaccgacaattaacaaatcgggtttaaccttaggaatcacatcttcgataatcgcttcgcctggttcgccttctgcaattactgttcgcacatgattcacaccgcgcacataggcttgatcttgatattctcgtaggtggttttcaagatcctcatattggccgtggataaaatccttgttcaatgcttgatagacgttcatttcgtcattttccaataccgatacaatgactaattctaaatcctcacgtttagcccgctcaattgcataatcaaacgctaataacgcatcctctgagtcatcgaccccgactaaaattcgtttaatttctaaaactgacatgtgaccaacctccaattaattttcagttgctaattgctgttcaaaccgcttattgcctttatacaattcaataatcatccaaaccaataatgccatcacaccagcaatcaacacatatgcaatgcgatcagcagtagccaattgtgcagcacttgcgtgatcaccatagaaagcttcgatttgtcctggcaaccccatcatattcaaataggtcaagccaatgaccgataaccaacctaagcttttaatcaaccaactattcttgaagcgatcccccatctcaacccggctgtcggtaaacatcaacagtggcagcattgaaaatggtaaggcaaacgctaagaaaacttgggaattattcatcaaggtattgagcgcctcatgctcttccaaggctggtttattgctggtcatcatgacgcagattaataccggaatcaccgataacaagcgggttaccaaacgccgcaaccacaatggcattctcaagtgaatgaacccttccatgatgacttggccagttaacgtcccggtaatcgttgaattttgcccagaagcgagcaatgcaacggcaaacaaagttgataagattccggtccgggcaacacttgcaagaattccgttactcattgttgaggtatctgacaaagcttcaaataacccgaagaatgatggatctttaaccgttcccattttaaaaactgcaacccccatgattaataacaacgcattaacgaaaaatgccatcgtgagttgaatgtttgaatcccaagtggcaaagcgcactgtttgtgcaacctgtgcttcgttcttgcgatcaatcttccgtgtttgcgaaatcgcagagtgtaaatatagattatgtggcataacagttgccccgataatccctaacgcaccagtcaatggggttagtccaccaacagctggcccggtggcaaaggtcttagcagttggtactagcccaacaatcacccctgcccaatcaggatctgagagtgctacttcataagcaaaaaccacaaaaatcacgacaattaatgcgacaacgattgcttcaatcttacgaaaaccaattttcgttaagagtaataatagcatgacatctaaaatcgtaatgaatactgcaatcagcagtggaatcttaaataataagtacaaagcaattgccgccccaataacttcggcaatatcggttgccataatcgctaattctgtcaaaatccacaagacaatgcccaacggtttactcgtccgtgcgcgaattgcctgtgctaagtccatctgagttacaatgcctagtttagccgccatatattgtaataacatcgcgattaaactagacaccaaaatcacggacattaacaggtattgaaaactctgaccaccagtaatcgatgttgaccaattccctggatccatataacccactgccaccaatgcacccggtcctgaatacgctagtaacatcttccaaaagcctttgccctctggtacttcgaccgtcccattaatttcttcaagtgatgggccgttcgcatattcaatcagcttgtgcttcttgcccttttcttgttgattcattatcctcactccttattttgatcttgataacagttttattgtacgccgttttaatgaaatgtaaataaaaagttaggcaatgctaatttattttattcaaatcgataacaaatttattaacgcaagctacaaaaaaagcgccgtcgaaattattctcgacggcgctttacatactgctttaatcatccatttctttttcaattagcgcgccagtttcagcgtctaatttaacttgcattttttgctgtttttgatgaccttctacttcccagactgttcggccatcatctttttccaatgaccatttgatcacgttcccggtgaagtattgttgcgctttttgaagagcttgttgaggcgtcaacaattggtcaaacgctaattgcttttggtgtcgctcgacgccattttgttcatcggcatcaagggcttctttcgacaatcgactggttgcgccagttcgagcatccacatgcatgtgaagctcttcattgtcgttcattcccgttaattcataaaacatttggttaccccattgcttcagctcaacctcggttaaatctgatgcaggatattgttttgcgtacaattcacgggctttttcaagcgtcactttcggagcttgaaccgtttgttgcggactagtcgattctttttgagcggggggtgctgaatgttttgtttggttggctgtacaacccgtcaataggccgagcgttactaaactaacaatgattgttgttttgcgcatcctgttctacctcgctttgttttgatacttaaggataccattcaacagggtaaattaaaaagcaatatcccttcctagagcaatgttgtccccactttgaccaataaaccaagcccatacacgatgatgatgatggcactcactaagttgacgcccatcaagaattttggtgaaacttttttccggaaaaggctaaagataatggcgataccaaagaaccaggtcgcggttgccgaaacaacccccacgatgaatggaatcgcctcgctactcgtcatgccaccccgcaatgcgcccagcattaatgtcccatcaatcaaggcttgcggattaccccaaaccgccacaaatgcagtcaaaataaccttctccagtggcattggttctaacgcgccaaacgtaacggtactgcgggcactttttaaaatggtgtatccaatccataaaatcaaaagtccaccgattcccataatggctaaccgaaccgcatcgttttgcacaatcagtgcgccaatcccataaaacgccacgagtgaaaagagcgcatcaaataaccagatgaacaaactgttgaaaactgcccgccgtgttgtattcgacatggcattattaaaaacgaaaatattttgcatcccgattggtgcgacaaacgcaaatcccatcaagattccttttaaaaagaacatctattaacctccttggcaagttacctttcagcgtaacatatctaggctaaactttcttgtctggatttaattgtaaaatcagcatcgtcatcaacaagaataatgctgataaaatcaacgtccgttctcctaagaatgagacacatagtccgaccatcactgcaccaatcgtaaaactgataatgatgcgtaaaatttgccagcccttatcggctgccttacgatcatgtttaaaaacagcgtcataaaaactttccgccatcgtccgtacatttccagtcatcatcaatgatgtaaatgggccaccatccaattcacgaaattcctgtaattgcgcagccgcaatgattgaaacaagtgaacttgcaacaatatccggtacatacggtgaaattcccgcaacaatcgttaagaccaagacttcaatccccaagataatccgttgtcgtttgttaatcgattcgtctttttcaaaccgatgttgtaaaatgcgcgttaagattgttcccaacataaaggcgagaatcggggtaatgtgccgtaataatacggaccatttcatctgccccaaatgggttcctaataaaattagattccccgtttgtaatccggcgaagacttccccgtgcaccaaataagtgtaagaatcaaagccccccgcagctgccagtagcccgccatataataatttgtcgctcattgtcattttgttccgcattaattcatcctactcctcaactaaactataagtattaactctatcggaaaaaccactcgccgtctacaagtagttatcatttaaaacgttatcaaaaaaaggcctcagcaaactgattttgctaaggcctttttggcttaattttctacgtcaccattgaaaccggctaattgacttgaataaattgataaacgcgtcgcataactaggatggtcattattttccttgaccacttctttaagcgtcgataattgatcggtaataatgccgtcaacgcttgtaaataacatgcgttgcatcacatcctcatcattcaccgtccaagcatatactgtctgccctttgccgtgtgcttgacccacaaaatctgagtcgagcgtcgtcacttccatcgtatagccattagccggcgtttgggggaatgtaatgttatacggcagaataaaactaacaaatagttggggtgctttttgtttaatttccgccacaatcggataacttaatgaatgaatccggttatgattcttcaaaagtcgtttttcgtatttatcgataaagtgttgcaccatctgtggactgtcttcattcgttgtcttaatttcaacgagtagtttttgatggtgcttttcggctgctgctagatattgatcaaaactagcaacctttgcagaatgaccattttcacggacagtcaatgccgttaattcagcaagtgtcatgtcatggacgccgcgatcgacacccgccaagtgttttaaattatcgtcatgcatcacgacaaattgttgatccttggtttcatgcacatccatttcaacataatctggctcttcctgcgccgttttttcaagtgctggaatcgtattttgcacaccattaccatcatctaccccgcgatgcgaaatcaaggccggttgatcgtccaacattccctctaaatagacataattgtacaatgctaccccaccagccacgataacaattaaaccgattgtgccaatttggcggagaatcgtcaaattagtccgttttttcaccttagattggcgcacagccgtcgccattgcgggaacttcaccatattggttcaatacaatctgtaagactagtaccaccgttaatgcgagtaaaatctgactgacgatttctgaaataaacagattcaaaatggctaaaaataaagcctgatgtggcaagtgttggtcgtaataccgttgactagcaaacaagattaagcggaagcccactccaacaattgctaccgacgttgttaatacaaagccttttagaaaaatacgccaagcctgatattgggtagcttgccaacagcgtttgagcgtggttcttagctgcgcctttggatgtgcaatcgtttctggtaaaaacgtgattaagcgaattgaaaggactaatgcactcgcgtagaccaagataatggggacccaaattttgggtgatgaccacatatcctgaataataaaatctggaacggtcaccttggataacaacgctgatttaaagaggacctgtccaaagggtaagattaataagaaatacagtaaaccaaccaacatcgtggttggccgtaaagcgactaatccccggactgtttccttaaaaatcatccagtatgtttcttgtgtttgcttttgaatatggcgcatactgcgcaacaagaacgtcatttgcagataaactgccgcgcaaatcaagaccagaatgattagtaagctaatcattaaaagcggatgacgcatcatcaccggcaccagattggtgtaggttaaatacgtcacgccattgagtgccaccaaccgttctacaagccacgtaaacagcggtgccaccaagctgccaataattaaattcgtaatgacgagcagtaataaataaacactccaatgttgtctaaagagccgataattagcccttaaaaatgatgttaaacggcgcatataagttcctcccgaattgttacgttaaaattggtaataatgaaatcatcagataaatcatgctactaatgagaacaatcgcgacacttgtccaaaaattacggtgcttttgaaaatgatataaggccaataaactgccccaatcgagcagttcttgacttggaaccgcaagccacgataacgtgccaaatattaaaaaactgacaacgactgccgttaacaagcgcaagaaccaaccggatacccgtagactttgtaagattgtattcacaagctgaccagtcgtaataatcaccatcatgtacaaactaatgaataatatctgacaacaaaagaaccatgctaatgtcggccagacctggttctgataaatcaaggctgcgtaatcatttattagaccgacttcaagtgatttaagcagtacctgatacattaaaagggctccaacgattggaatgccacaaaggagtacaattgcaccgatagccccacgaatattgcgccaactaggaagcccaaatgaaccttcttgtgccagccataaaccatcaaaacgcgtcaaccaccatcctagcgcaatgactaacaccaagtaataagcaaagcttagaagacgtaaccaccacggttgtgcggctaactgcgcaaagtctaggttaaataattgcaacagtggttgattcgtattcaaaagcgttaacacaaagatcaaactcgcaaggattaatccccatgtgcgcttactgagcttttgcatcatcattttgctttgcctcctttaccagagtatcaatatcaaacgatacaacccgaccaatccgcgttttagcatttaatgcataggctttggcaccagattcaaaaaccgcatataaccgattgccatccaacgtaatctactctaaatgagctggcatccgaatcttaagtagcgccttttctggcgtaaattgttggggccgcccagtcgttgcaaaaacgtaaatccatgaatcgtctaacccgtaggactgcgaaaaaaaagcccgcgtatcactaaaagttagcccttgaatcttatccactgcttgccaacgttgttcacttttaagttcattactgcggatattccgcgccgtcaatttaacaccagctttttcgcgtcctttaatgaccgctgaaacctgaaacgactggacgttactatccccgaaaatattgaaatagccgacccataatgccccatcgtgatagctaacaagtgaagcccgggtgatcgacttcaacaacgttgaatattggtattgaatcggcttttgcggctgatctgcagggtactggcgaatagttgttaacttaattgcaaatagctgtgcacgtgccttcttacggccacaaacccataagagatcatgttcaggatcataagtaattccaccaacgtgtggtcggccctttaaaataatattcttcaaatgtcggccagtccgcttatccataatggacagaattgagttgccttgccgttgatggtcataagccgaaacgatcacatagtccggcgtaactgctcccccttgaggtgtcatcatttctgctgtatatgctttgtaacctgccggcgtttttttcaacatctgcgcctggtctaaatctggcaccaagtaagttccagattgggttgcctttgcatactgtccaaaagaagccggcgttaacccttgatagtaacccaaatcccgttttagatgagggagtgtaaatcgcgcataaattacctgtctagattgcgtgattgcctgttcagtaaccgtcttagcaggaccgaaaataagccacaaagcagctgataacaaaagcaagcagccagttaataaaaaggttgttcgtttttccaaatgcatcatcttactccttatccgcaacaaaattagatacttgttgattccctcagtataccaaactctgaatttaatgtacccctttaacgaatgaacgaacaaaactattagatgcacacaaaaaaagcataaccaactaagtggttatgccttttttgtgatggctaatactttaactttccatttatctctagaatttcatcaatatggtttgcgtaccaatcttcatatgcctgaccgacaagtgctaatacctctctccctttgtcggtaaccgccaatgatacccgtcgctgatcatctggtgtcccaaattctttggttatcaaacctttccgataaagagtgttgatcttgcgtgacgttttaggagcgccaccaccaatttccttagcgagttgtcctggcgtaatcgcttgcttttcttcgattaactttaagattaaatggctgtcaaaactaacaccatattcttcaccaatttgattgagtttaaattgaatcgttttgattgcattgacccaatcaacaaatctgttaaatctttctttgctttatcttcagtcattttatattctcctactaaactctgttgccatcatttgtaaaaccaacatttactaataataaattagcttataattaagcaatattataattattattatctagttcatcgcgctattatcttttgtgcaagtcattatagtcttaatttcataaaaagtaaatattttttaaaaacttctacgacaatcaagattttcggcagtgattcatttacaatttaccaaaatccacatcaataaatacctttttatgactagagttactcagatgaccttctagatttgatttatattttgtttataaaattgattttatttcataaaaaaaggcccgcatctaggatgcgggccttcaatcattaatgtctagttatggatataagtaaatgccccggcatttgaaattgtttgggtgttaggaccagcagggttgctgaagcccatcccaccttgagtgatggtaattgtcccagctgcggcatcgtatgattgaacgtaagcaacgtgaccatatgtcccatctgcggcccaagaacctaccatttggccaccagcaaagctaacgattgcgcctgctgctggtatatggttaactgtgaagccagctgctgcggctgaagcaccccattgagcgccattcccccagttattgccagcccaaggtgctactgacttaacataccatgtacattgaccccatgcatatgaattcccagctgaattaccagcaacttttccactgccaccgaaaacagatgtgccacccttattatctgatggcgtgtcaattgatgtaggttgaggtgtgtcttttttagcattgttggcattgttggcattgttggcatcgtctgcagcctttttagcagcagcgtctgcttcttcagtacttgctttgtcgaagtctgcttgtaaagctgttaattcgtctttgttatcattgattttttgtgataaagctgtttgtttttgatcagcttcactcttcaatgattctaagtttgctttttgtttttctaaatcagtcttagtagcaactaaacttgctttagtattttcttgttctgtcttcaagccgcttaattttgccttagcgctgttaacatcatctaaagcttctttacttgcttggtttaatttattaattgtgaatgaacgcgaaactaaatctgaaaggtcatttgagtttaaaaggaagtcaacatatacgttcccgctgacagcatccccactcttttcttgtaaggtcactaattgtttcttcaatacgactgttcgtttagaaacttctttttgagcatccgtaatttgacctgaaagagattcgatttgattatttgctttagtaattgctgcttcttgatcagcaatttttgaagcgtttgttgaaatcttttgatccaacccaatcacttctatattagctgattcgatttgtttgagcaaatcgtttgttgcgttcttattagcagtaatcgcttcttgtgcttcacttgaagttgcagcagatactacgtttgttgaaagaactgaagctgttaataatccaagagcaattgtagtcgtaatcgtttttttaaatgacatggtttattttctcctattagttaagcccgaactctgagactaagtatatagggcgaatgttacattaacattacataaacattatgcttacttaacaaatcataaaatataggctttgtaagcgccttttacgactttagaagccgatttcagagaacccttccttattatttccttatcatatttaaaaagatgacgccgaattcattcagcgtcatctttttattagtcatttataaaagtcacttcttcatgctgcgtccaactatccaagcgcgcacttttcagttcaattgcgtagataatttcccgttcacgatcttctgctgataaactatccataaacccagggacttgggcgttgtaataatcagctaattcatctaacttgtactgcgcgcgataaacacgcaaccggctgctagcaatcgtcattccttcgctagttggcattgtgtgaattgccgctaaaccacgatcgagttcttcaatcttaggggtatccggtgctgtcccaaaataccaaatattcggtgcatcatccaacacgataaaccgcatttggcggcttgaaggttgcccattttcatccgaagtactgagcatcatttcatttgtttgattaacgaacttctgaaatttgcgcaaatcattttgatgaatatgcggattagcgttttgtttatcaatatacgcgattacttcatcgatcgatgtaaactgtggttttggccgttgaacagcatcccgtcacttttaagaatatctatgaaatgcaagtaactgctaacgtctttcttcccaaagactcgacggaaactgtttttccagcactaatcatcggtgctcccatcggtgccgttaaagaacaggcagctaacctatatgccattaagctcgctgaacaagggtttgtaaccgtttcatttgatcaatctgcttggggcgggagtaacggtgctctgcgcaacgcgattgcccctatcttatatgcggagaatttctcagcagccactgactacctaaccactctagactgtgtcgccaatgaccgtattggcttaatcgcaattggttcggccggtggtttcacgctcaacgcactcaaaatagacgcacgtattaaagcacttgcaactattaacttaaccgatatgggtgccattgttcgcgaacagcgtgatgcactaggcggtaacgcattaatcgaggaatcctcacgatcccggacattagagattgcaggtcaagcaaccacttacgcccatggagtacctgaagaactggacgaaaactcaactgatatcgaacgtgaattctacgacttttatcgtacccaacgtggcgcagccaactcgacactccatcccactcgtacaacttttactaaactattagatttctatccattgcgcgacctcgaaacgatcacagaacgtgccatgctctttgttgttggtgaagaggcatggtcacgacatttcagtgaagccgcctttgccagtgctaacgaatcaaaacagttattaaccgtaaaagcagctgggcatgtcgatttatatgatcgtatcgcgcttattcctttttcagaattaactcaatttttcaccaaaaatctataacaacgcaaaaaaataccactgacagcgaattgtcagcggtatttttatattatttatcattcaagtaggctttgactacctgataatttttgaagcccccactcaagttatacacggatttaaaaccgaggttcagaagtaaattctgagcagcattagccgtaacccctttattgcaataggtgacagttggaatatccatatctaattccgtgaaccgatcacgaatttcagcaagcggcatgttaatggcatgttcaacatgctcgtccgcatatttttgcttcgaacgtacgtccaaaatctggaagcgttcaccttcagccaagcgttgctccaattcagctggaggcaagagcggccgcccatgcaatgcattatcgagcgccattcccgtatagagcactggatccttagtggttgcatagagtggttgataagctagatcgagatggaataaatcggccaccttcgcacccaatgtgatggcagtcacgaaaacgtcaatccgcttatcaaccccatctttaccaatgatttgtacacctaataattttcccgtttgacggccagcaatggctttaatgacgttttcggttccatttaagtaatctgcatgccctggtttaatgttgtagagtacttccacatcatagtccttagctcgcgcgactgcttcagtaaacccagtctgtgcaatcgttgtatcgaacaaccgaacaatccccgttccaagaatcccgcggtgcgttaagccaccgccagtcaatgaattgccggcaattcgtcccattttattggcagtcgaacccattggtcgatacagtggtgagccatcaattacggagaaactctcaacaacatcgccgaccgcgtaaatattcggtacagtcgtcaacatttgttggtcgaccttcaacgcccctgaaggtcccttagctatcttcatatggtcgaccaactgcgtttgtggttcaacgccaagtgctagtaggaccaaatccgtttgaatggtcgtctgattactcaattctaccgccgataccacaccatcctgcgcagtcacttgttttgcggttacactctttaacacatgcaccccgttagcacgaataacttgttcagcacgataggccatatcaccatcaaaatgggtcataatttgcgcgcttcgttgaactaacgtcacgtccaagccacgtttttgaaattgttccatcatttcaagcccaacataaccggtcccaaaaatcgtcacattttgaactgaatggtgctgtaaatacgcgtcgattgcgcgtgtatctaccatgttatgcatcgtgaagacgttttggtaggcttcatcgaacggtgcaataatgcgtggcgtggcccccgtcgctaaaactaggcggtcataataatcttcaaacaactcgcccgtctcaaagtttttcaagaccagcgcttgttggttttcatcgattgaaatcacttcgatacccgtcataatgtcaacgttgaagcgttttttgaaccacgccgcatcgcgcggaattaacgtctctaggtcttcaacctcaccccctacgtaataaggcatgccacaaaccgaataagaaatatcctgacctttttcataaacgacaatctcatcaacttcactatttcgccgcgcctttgctgccacactcgtccccgctgcaacggagccaatcacaacaatcttcatgatcatcaccaatccttattatatttaaagacaatataactcattttaatcttgaatgaaatccatttgttttcgactcccaaattgcaagaacaaattagccacacgataaatcctattaaatcagtattttcattaatattcatattttatggacttaacttaaccggcggaagcagcggagaaaagctctttgggtgtttgatagccagtttgccggtgcggtaaattgtttagctttgactcaactgcttggatatcatgaggacccaaaatatccatggatagacccttgggtacatcgcggcggatcattcgattatgcgcttcgttagtcccgcgctcagaggaacgatatggatgggcataataaaggtcagcgacaccggtaagtacagcgccaacttccgagaactcagcgccattatcggcagtaactgacttcatgattgatccgtattcttgacagatcttggccagctcatagttgactgaatcggcatcacgaccatctggatgtaagctgattcctgagaaaacttttaagagagggtataatgaataaatcatctctcaaaaggaaggaatttttacatgccaactcgttacgacaaagaattcaaacaaaacattatcaacctatataagcaaggcgaatcagctgcccaactggccagagaatatggcattggctattcaacagttcataagtggatccaaggccaggccaaaactcaatccggtaaatcgccagacaaaatcaaagcgatggaaaagcgactggcttcgctgtctgaggagaacgaaatcctaaaaaaagccctgggcttccttgcgcagaagtaaccaatatctttgattacattcaccaagaaagccatcaccaccaggtaaccaagatgtgccgaatcctccgagtttcaaaggtcgatgacagtgggctcgattagcttcgtacttagcttgtgctgtttctggtgagtatacagcgtaatattggcgttgaccattcactttttttacttggtcgatctcgccgcggcacaattcattattgattgtttgatgacaaacattaagcgctctggcaattgcacgattggaatagccttggctgtgcagcgtagcaattctgcctcgttcaaacgaagttaggtgctgaccttttttctgactgtggtattctgttcttgcatcaagacaataacctctttcattgtttgtgtaggaacatcaatgataacagagattcgtcttggtgttttttattttatcaattagctaaaagtatttggctaacttgattataaaacgcgcgatttttatttggaggttcttattatgtttaatggtctattcaaagatctaacaccaaggtcgtttactggtactgcgtcgagttattattagtatcgtgggtctctgtgtcttttcagctttctttattatctttggtgctaaagtaacttttgaaattcttgcaatatttgctcgagatacgactacatttgtcactgtgttgctttacttgctttcattatttatttttttaatcgggttcaaaaccaagattactcaaattagtgttgttacagcctggattagtgaagtacagtttttatttttgttattctcgccaatttggcaaattcacgctggaagagaagttgcgttctatgttattttggctatgaggattctggtcacagtattactggcatttcttttgtatctatatcatcgcaacaataaagcaaatcgaaaataccgtcgataacttaatacaaaaaaataggctagcccttgagggactagcctatttgaatatcatcaataaaaatcgcgttcaaattgcattaaatcattgattaaagacgctgcttgcttcaattcagcatctttatatttttcggtcaccttatcaataacttgcgctttcagcgtttcatgcattttatcgtggctttgcgcaatcacacggcctttagcggtcaaagaataatagatttttttctgatcatctggttttttagtcgcttgaattaagcccatttgaatcaacttcttagcggcgcgtgtaatgccgccacgcgtaaccgccaaccgatccgctagtgctacacctgttaattcttcggcctctaatcctgataatatgtgcaatgcaatgattgatagctgcggaatcatcgttttcaagttctcatcactcagctgattttgcaaccatttttgttcttgaacaccgcggccgttgacactatctgagcgtaattgcttgattgcatgatagagtgccatcactgattcgttttccatttgcttaacctctcatcaattgttaccaccagtatacaccaaattagaatactttagctttggtcgtcgcttccgttagggcccgtgctaatatttgttcacgttgatctgcatgagcatccgcgccttcaatatagacgtgttcaacttgattaacaccatagaatttcaacatattggttaaatacatatcgcctaaatccataagtgcagaactttcgttactcctaatcttaaataaacggcggaacaagaacttaacgatcccccacttgcccccagcgtgataaacactgccagctgcttggatatggattgctttcttaccttctaacaaacctactgaaccgttcggtgtgtatttgaatgttttgtgggcgaccgccgtcaaatctaaatattgtttcatctcagctggtaaaaaatgattgtacattggattgatgaagacatatttatcagcttcgataaattcatctaaccaatctgcgtgttgttgtaatagtgttttctcagcttcagccattggttcgtcaaatttttgtttacgccatgcagccattgtcatatcgttcaatggtggaacacctgcttcagtatatagatctcgaataataatttgatcatcaggatgggtccgacgataagtttctacaaagcgggtccctaccgctagggataaactcttttcaacatggggatgtgcttggattactaataatgtactcatttaaaaaaaccttctttagtttcgtttagttgcttgtcaacaaaataaagattaccatcgttttagttgcttgtcaacaaaatgttttaaattaccgttagctatcaaatttagctgaagtgccctagtagcgccctaacgtgtcatttttaagcaaaaaaaataggctatcccttgagggactagcctatttgtgtaagcttattaaacatgctttttaaagctgactcctgcgcttagctacaatccgcaaacaatcgactaacgtcgattattcacgaatttaggctaatgctcagaatcaacccgctttaaacacactctttaataattagtttaatttcttcttgcttacaacattcaagttttcgtctaaatcataaacaactggttcgcctgttgccatttcaacgtccatgatgtcttcatcagagatgttttcgatgtattttgttaaggcgcgtagtgagttaccgtgagcggctacaatgatattttggccgtcgattaattttggagcgatttcgtcttcccagaatgggataacacgttccaaagtaaccttcaagttttcgccaccaggaattgcttttggatctaagtgtgcgtaacgacggtcgtttgctgctgaaccttcatcacttgcatccaatagtggaggaagtgtgtcgtatgaacgacgccagatgtgaacttgttcgtcgccccatttttcagctgcttcagctttgttttggccttgtaatgcaccataatgacgttcgtttaagcgccatgatttcatttctggaacccataattgatctgaaccttcaagtgcatagtgtaatgtcttgatggcacgagtcaatactgatgtgtaagcttggtcaaaaaggatgccttcttttttcaataaagcaccagcgttttgagcttggcgtacgccttcttcgcttaagttaacatcaacccaaccagtgaattggtttgataagttccattcactttgtccgtgacgaataaaaactaatttagccatgtgtaagtaacctcactttttttatttttactctgttcattttacactgtttgctacacaatttacagtcttatcttttcagaaaataatgaaccttctttttttatgctcgatcagtcgttttcgtttctttcaataagaaaagcgccgccaagatggcaatcaccatgagcactagcgacgtcgttacaacagcgatcatccctttatcaaaagccgtgacaacaatttgttggacctttgcggcatacggtgtcttcactaattgttgcccccacgcgattgcatgtcctgaaaaagcacctgcttcaaccaatgcttgctgaatgccagttgctgccgccttcgggattgagctgccactaaagctagtcttcaaactcgtttcgtaggcattcgtttgtgataaaccgagaatcacaacaccgacggtaattccaatttggcggaaaacattcaataaaccggatgccattccgatttcttgaggattaatattatccatcgccgctgtattgatcattggattgataatcgcattgcctaacccagttagcgcaagcaatggtaagagttgcatataagtaaaatcagtcgttgtcacttgtctaaaaattaataaaccaagggcagaaacagtaaatccaaaagcaatcaaccattttttaccgaatttatagcctagaacacccgtgaatggtcctaaaacaagggaccataaactcattggcagttgatgcacaccggttgaaaaggctgagtaacccatgtaattttgcatcaaactcgtttgataagcggctaaggcaaaaatgccagcgcctaatgagaaagctaaaatcacaacacccacgaaatggcgattcgtaagtaacgtcaagttcatcattggtgcttttgctttcaattccacaaagacgaaaagcgctaaaattaaaacggaagcaactaaccaccccataatgcgcatatctgtccaatcccagtgcatatgttgttctttttgaatcaacccataaatcccggagaataaaccaattgctgacaagatcatccccataaaatcgattgattcgcccgcgccataagctggtgtttctttaacattgcgaatcactaagtaaactgaaataatcccgactggtaaattgacgaaaaagatggatggccagccgaagttttcgactaaaaagccccctactaagggtccaatagcagttgaaaaaccaatcacggagcctaaaatccccagtgcagtcccccgttcacgcccttcaaagttcgacgccactagtgccatcgataaactcatcatacccgagccaccaatcgcttggaccgcgcgcccgatatctaataccaataaatttggtgccagtccattaacgacagaggccgctgtgaataaaatcatactcatgataaaaattttcttgcgcccgaacatgtcccctaatttggaaacaatcaacaagctgaccgcatacatcaacgtataagcgttcaaaacccattgtaagttgctaaaagttgttttaaaatcaatcgccatacttggtaaagcgacattgacgacagttacgtctagcaatcccataaagacacccagactcatcgcgaccagcgctatccagcggttggttgtttttttcattttactatctccattttctctatctcatttatttgtgcttgtagccaatccattttggctttgatcgttgtgattacgaaatcggttgaacgaatctgccaataataataatccgtcattgtctcatccgcatcttttaattcagttagatgtttttccacaccgctataaacatgtaaatcttcagccaactcactgtagaaatcttgtaaaatgctgacttgttctgctgcatcaatgtagtgcatcccccgcatcttaaaacgataagcatcatcccacttcgcatcatgaacgactggtttagccattaattcagcaaaatagcgccgtccctcttcagtaatgtgcgcaatcttcgtaccacgtgaatcctgatcagcttcctcaaacccaatgcagcctttgctttccaatttatctaacaacggatacaaaaccccatttgaaattttccgtctgggcaccatcgcattttccaagataatccgcaacttatagcccgacatattccggctcattaaggcggataacatcagcaattcatacataaacgcataacctctctctttaatcagtcttttagacaggtctttaagacttattaagtctagttctttccgacatatttacaagcctttttttcatttttagacaaataaaaaaacatgatccgcataagttgcctgataacaaggcttcatgcggatcacgcttttatggatttagggatgtataggttgtacactctctctttcaactaattcaattgaaagtactttttgttgtggcgcaatagcaggctccacaatccggttcaataatagacgtgttgcttcttgcccaagctcgaaaatcggttgcttaatggtcgtcaattttggtgtgacatattcacaccaatcgatgttatcatagccaatcactgagatatcttctggcacctgtactcgtaattcacgtaacccacgaatcaatccgatagcgagttcatcattgattgcaaatacagcagttaccccgctatcaatcacctgtcgtgcaacttggtaaccacctaatttcgttaacggtgtcgttatttgccactcatccgccactggtaattgggctttcaacatcgcggcttgataaccaatgaatcgttgttcgatgttccaagctcgttgttctggtaaaacaattccgactttatgatggcctcgttcaatgagataccgtgcggccaactctccaccttgcgtatcggcaaccgtaatttcatctcctgcatgttgtttatctgattgatctaataagataaacggaatttgtcgtttttgcagatagctatccaacgttgttttttgtaaatgagggacagccaaaataaagccgtcaacatttcgacgaaccaattcctttaaataatgatcaactttctgattatgcgcccctgcactataaattaatgggatgaaatcgaattgataggcaatttcttcgacaccttgaataaactgactaaaaaaaggattattgatatccggcaccaataccgcgatcgtcttcgtttctttattaatcatattttgcgcgaaataatcaggttcatactgaagtctttcccgagcggctttgacccgcgcaatcgtttctgcgctaaagcgctcacctttattattaagaattaacgaaactgttgtgaccgatgtttgcgccagcgcggcaacatctttaatcgttacttttcgaaccattttggcactcccccgaatcaaattaataaaaacgcccacagccggctagccatggacgctgttaatatgattataactgaatatccttttcataaggaatcgaattttgcgcccctttagtttggactgcaatcgaagaagccttattggcataagtcattgctgcttcaatgttactgtaatccaattcaagtttcgtacttaaagcaccgataaaggtatcaccagcagcggttgtatcgactgcttgaactttaaatgccggtacaaacccggttgttgttggtgttgcatagaatgagccctttgccccaaccgtaatgataacgactttaatccccatcttaaacatcgcttccacgttagctttcattgatgcttcgtcagtcactttaatccctgtgataatttcagcttccgtttcattagggacaatcatgtccgtcactgccaataattcagctggaatatttttaatcgctggtgcagggttcaaaatcgtttgaacgccgtttgcacgggcaattttgaaagcttcaataattgcaggaataggtacttcgaattgagcgacaattctgtcagcatctttgatggcttcttcggcttcatgaatatcatcgactgtcacatcttggttggccccaccatagattaaaatactattttgtccactagcatccaccatgatgtaagcttggccagtcccagctgtttcagaacaacgaacgtgatcaatgttcatgccatcttttttgaacgtatctagcatgaaatcagcggcgccttccttaccaaccttactaatgaaagctgtttgcgcacctgaccgaacagctgcgattgcttggtttgcacccttaccaccaccagcaactgcgcggccatccattgctaatgtttcacctggttgtggaaaacgctgaacgtttaaaattgtgtcgacatttgttgaccctaatacgattacttttttcatttgaaagccctcctaatggttaaaatacaacgccactttctaaaataatgttggaataaggtgtcatttcacccgtccgaacaaatgctttggcctgccccaagtcctgtttcatttgtgcgtgatcaataaattcaatgggcgtctcaccaatcacttttttgatttgttcaagttgtgctggattagctgttttaatttcgtttgctaagtaaactttttgaatttccaattctgttagaacatttttaagtacttgaataaaacttggtacaccattttcgatggccacatcgattttttgcgttccagctgggaccggcatcccagcatcgccaatactcattgtatcaaaatgccccatgtttgaaatcacatttgaaatttgtgaattgataacttgtgtttttcgcataataaatccgccccactttttatttgataaaggctgtcacagatccagccactaatacgagtactaaaccaattaatacggcaaccatttcttttttggtcttttgttctttcaacacataaatcccaccgattgtggcgaaaatgacactggtttgggataaaacaaaccccgttgctaagccattcacagaaggttgtgctgagataagatacgtcagcgctgcaaacgcgaagaagaacccactgaagatattcttatacgaagttgcttctttgaaaggttgataagtcttgctggtttgggttaatccgaagataacacctacaattgccattcctaatgcttgtggcaaaaagccttggaaaccgtccgcgtgtactgcttgtggaaaggcggagtaccctaggtagcctagttcgccaactaataataacaagatgccacgcaccgcgccatttttactagcgcttgaacgatcttcactccaggctgttaaataaacaccaaggataattagaataatcgctgtgaacccaatcaacttcgattgtgtacttgcccagttacccaagatgaagacgccccacaaagatgccccaacaagttggaacccagttgtgattggcatcgttctagaaacacccatggtttcaaaaacatgaaaggtgataatctgcgctaatgcccaacaagcccctgaaattaaacaaaaaataaatgttttggtttctggaatcggtgtcccgcggaaaatagccacaataatggccagaattaatgtcccaagtgtcgttccaataatttgactcgctggtttcccaccaattttaccaacgatcacagggaacaatccccaaccaatcatcggcattaatccaattaagatattgacagcattcatattcaatcctccgtcctttattctaggctagtaaaacgttttactaactatcatggtgattattataaaggagcttctttgagaattcaactcttttttgtaaccgctttattaaagaacacaaaaaagattaatctggcgcgcatttggcctgattaatctttttttaatttattttttctttgcttgtccgtatcctcgtttagatttataacctgcatctaaaatttgacacatttcaacataatgtcgttgctgtgtttcttcagctttagcgccgtaaacataacgtgcccattcgcgttgatagcctggtgttagtgcgtcgaaaaaggtttttgtggctggtgtatcttctaatcgagcactcaatcggggaatctcaacttcatattctgatagtggtttttgtggcatggtgcataactcccttattttaaccgcataacatctctggcaatcatcaactcttcattagttggcacaatcaggaccttaacgcgtgattgatcactgctgataatgcgttcttggctgcggacattatttttatcttcatccaattctacaccaaaacaagcgagttgttcacaaatggcagcccgtaattcactgccgttctcaccactaccggcagtaaagaccagcgtatctactccattcattaaagctacgtaagaaccgacatacttcacaactcgattgacaaaaatatcaagcgccaattgggattgtggtcgtgagtcagcggtttcttctaaatcacgcatatccggtgatagttcagaaatccctaataagccagacttatggttcaaaattgtgatcatctctggcattgtcttacctaatttttcagctaaaaaggctactaatgagacatcaatatcaccagatcgcgtgcccatcgtaatccccgcaagtggtgtgaaccccattgatgtatcgacagcgtgcccgtcttgaatcgcggtaattgatgcaccactgcccaagtgcaacgtgatcattttttgcgtttcaagcggctgatctagcatttcagccgctcgatgagcaacaaaccgatgactggtcccatgcgcaccgtatttacgggccccatacttttcataatacgcttgcggaatactgtataaatagttttcggcaggtaacgtactgtaaaatgacgtgtcaaaaacagccacttccggtacgcctggcaataatgcagtgaaaattttaatgtaataagcttgggttggattatgcaatggtgcatattcagccaaacgattaatctcatcaagcccgaccggattaattactgcagagtccttgaaggcttctccaccagcaaccacccggtgaccaacccccgtaatctcatcgagatgggttacgatatttaattccttcaaccgcgttaataacaacgttgctgcttgttcgtgcgtcgtaatatcttggacttgtttaaacttttcctgattgccatacttcactgtgaatacagaatcagataagcctaaccggtcaatcattcctttagcgattactcgttcagacggcatttcaaataattgccacttcagtgttgaactacctgcattaatagccagaattttttccatgatatcgactcccactctttcataatccgttcatggcttaattgtaagcaatttcataaaaagaaacaagccctattatatcagagtgcgtcatcaacgggtaacttctgagcatttatctaacttagcgaattggcgatgcaatcgccgatttgataagtgtagcaaagcacaggaagttattgatgaaagcacgtttaaggcaagaatgcatttggttgcggtcagcaactgagcattaatacaaactagcgcttaatctcgattttaagattaagtgctagtttagattaagcggaagttgttgcaaccaaaaagcacgttttatccataaaaaaagaaccgcccccacgcggttcttcctatttcataataactattctgcactttcttcgttcattttctttactttatttaggaatgaacggcccatcttgttatcttggtattcacttggttcaatgacatctaaatagaattgatcaatgaatcgaatcaaaccatcgactttatcacggcccatttgtgcttcgatttcacggtatttttcaacatagcggctcaccaaccggtctaaaacgtcttgaccttgtttagttaagctcaaaaatttaacccgttgatctgtttgaagatgttcttcaaccacgtacccattttctttcagtaaccgacattggcgtgaaattgctgaacgactaacactcatcgtcttagctaacttactacctgttaagttttcgttagttgaaatttcgtacataattaaaaattggtcaaaagaaactttgtaatttaaactttctccactgacaaagtcgcttaaattgctgacaatccaccgataaatcaatgaaagatgcgttactacttcccaatcatcagaatacttgcttgttgcttttgctgtcataaccttttctccctttactaaccgatctgtcatgcgtagaaacaattaacggatttaatttattttgctatcaatatattagcatattttgagagaaaagaaaccactcgattcattaaatagctataaatagatttgatgtgcaacaattcaattgaccatataatcatcaacccactatattagtttgtcgtgactatataaaaagaagtcattaaagataaaattattttcatccttaataacttcttttaataacatcttataggttacgatccatattgaacgtcaatttcgataaattaatgcccgacataacgagttccccaatcatcgaggtcgcttcagtcgccatctgcttaacaatcgcatggttttgctcagtcaaatactccgttaaggcagcgccttgatacttttgtgcttccacttgaatggcttcaatcatcgttcgcaattcttgcttacaacggtttaagtaatctacattgccttgaatgtactggctataatggccttccaccaatactgaaattgtccggtataaccaatatgcactcttcatatcccatttcattggtgtttcgctgaaacttagatccgtatcgttcgcattcgtgaaaaatggaatgaacggtgtatacgttggcatccccattgtgatccacatgatggccgcttgttcctttggcacatcattccgtaattgtaaaatatgtgcattttgcgtccgattcaaaccgattgggcggtaacgatacttgtcggcatcagtcccatgccccattggatcgaatggcgtttcattataatgtgagcctaacaacatttcaatatcttcaacactaattttatgttcaatacgccgaataaatggtaattcagccgattcgggtgacatatcaaaatcagcatcaaataaatgatgggcgtaccaaacccgtggtgtattatagtgccggtctttttcattcatcgtgccaaaaatgtggcggaaattccagcccgttttatccggattcaaatgatgggcttcaacgtattcttgaatgccttctgcccacataaaattgtcggcatccgtgaaatcaacttgttgaatcgccacttggttggcggcaactgcataagcatcatctggaatccgttgtgctagccataaatgccctgtcacaatttccatataccacacttcattgtgatcactaaagagcacactattgccggcgggtgagccgtattgtttaatcaaattaccgagatagctgaccccttcgcgcgccgagttaatgtacggcgcaaccatagcttgcatgcaatcttcatccaacccgtctttcaccaatggatcataagcgagggctttttcatttccatatgtactttcggtacagctcatcgccacgttaacttcgttaatactactttcatcataataaccattatgtttgtaatcaacattcggaacagcgggccatcggtagccattctcaggtaattcggcttcaaacccgtttaaccaagatttaattttagcacccttacgccctttaacagctggattgatgtgaaaccgttgtggtgttaaaggtaaaaaagtatcgtcgttacgcgcaatcatcgttgatccgtccaatgatgcgtttttaccaactaaaattgatgtacatgctgattccataagttgcactccctctgatgaccactttaattgaactcatcggtcacgtttgattaaaattttctcataattaatatccatagtgtacgcttctcacttgcgaaagtatagcctgatttgttgattaatttcctttaacccccgcatttattgcgatttctatacaatattggatttcacgttaatttccgatttcggaattatcgtcaaacgaccatgttagcgctcctaatttcatgatatattattagatgaataactaacaacaaggtggtttctcaatgaaaaaattaacacttgctctgttgctgaccatgaccagctgtttcatgattctagctggctgtcagaataaaacagaaattccagctgccgcaactaaaacagaagaaaaaattgatcaatacgtccaaaaagtgaaccaactctatagtgatggttcccgtaaagatcctgcgaagttaacagccaataaacaacaccaaattatcactgcggctgacaaactcgacaaacaaatcacgcccaacctttatatgagcggaattagcgctgatgcaaaggctgattacaaggctgcccaaaaagatctagataagattactggtaagcaaccagcaactagtgaatctgaaagtgttgcttctgaaaagcctgctaaaaagaagaaaaagaacaaagttaaaacaagcgcctttttcgataaagatgggattgtcaaagccgatgcacaacttggtgaagaaacggactataccgaccaccccaaacaacttgctgattatcaagaagctaaaaatcaattagcggctatggcagctgtccggaacttatttacagacgacaacctcaagcatattccagctaacctatctgctagcgacttcccttatgtccgagctttgattaataaatcaacccatgacggctttaaagaaaagtacttggcgtatgttaagaacgctgaaaatcaatacaacacttactctaacaatacccaagcggcaaccacgcaaaacacaacaaccgctaatcaagcaacaactaaccaaaacacagctaccaatacacaaactacgacaggctatgctgctaacacggcaacggggaatggcactggtgcaacaactggaactgggacggggacttcgacaacggataccacaaccggaaccgggacgactggtacacaaagtaatactcagaccggtacagatcagacacaaaccggtacactccaataatcttaagacacttcctaaaaagtacgctatcttcttgatatgcgtacttttttgacgttcgcttacgtttagtcttttaatcgccgatatcttaagaaacatgtaacagcgctctaactattatgtaacatgtttgttactttcagatgctatgctaatcagcgtactaaattaattcaaaattcaaacaacttaaaaaaatttttcgaaggagcacaacaaacacatgaaaaaacaaaaaatgacttacttatcttctggaatggttggccttgccggcttagtattgatgggtcttcaaacaaatgatgcccaagctgcaacaaatggtacggttaactacgctgacggggcaacaaccgtttggactagcccagcagtaggtcaaaaacctgctcgttacttggcaactaaccaacaagtaacaatccaagacacaaaacaagtttacggccaaacatggtacaaacttggtaatgacgaatgggtttcaagccaattcattacagccggcgatgcaactgctcaaccagctgcaacaacaaccgctgttaagaacacagtaacagctaacttccaatcaggtgcaacaactgtttgggctgacacaactgctgctcaaccaactggcgaatacttaacatatggcacaactaaaaacgtcattgatcaaaaagatttaaacggcacaacttggtaccaattagaaagcaaaggttgggttcctgctagctacgttgttttaaacaaccctaacttgaatggcgtcacaccaattacaaatgcacctgcagtgacaccagttgttgcaacaaccactacaactgaagttcaagcaccagctgctcctcaagcaacaacgccggcacctgctacagaaacaccagcgcctgctgcaacaactgaagcaacaaccccggctgctacaacaagtacaccagcagcaacaacacaacctgctcaaacacaaacaacgacaactcaaagcagccaacaaacaactcaagctacaacaactcaacaagcaccacaaacgaatacaacgacaaaagcaagtggtaacgcacaaactgttatcaacgctgctttatcacaaatcggtacaccttacgtatggggaggctcaacacctggtgttggtcttgactgttctggtttagtgcaatacgcatacgcacaagctggcgtttcattgggtcgtgtcacaactgctcaagaacgtgctggccaacgcgtctcacttgataacttacaacctggcgatatcctcttctggggtggcgctggtgcttcataccacgacgcaatctacatcggtggtggcaaatacgtccacgcaccacaacctggcgaatcagttaagacagcaagtatctcaagctacttcatgccttcattcgcagttcgcgtcctttaatcaaaaatatgtatttaaaaagagccacatcttaggatgtagctctttttttgtggttaaacttagtttaaaatatatttattttccatattaaaagaccatccaaaggctgcttttcaagcgacttttagatggtcttttaacattattttgaaaaaaattcattataattatttagctgatttacgttccttcaagaagttcaatacagcagctgtttcagcgttacgttttttagcattgttttggttaacaggacgacggttaccagaaacactaacatgtaagttttgtgacattgcgcgtttcctcctttcgtgcatatattctattattctaatctgaattgacttatttttcaagttaactttattcgtcttttggttttctgaaatagtttaggagccaactggtcagcggaacggttgctatgaccccaatcactccgattaatagtgcgagtccctcaccaattaaaattttatggttcacaattttactaattggataaccgagttgaatgaaccacatcgttaatgacaagaagctaccgaaaaaactaaagaacagtgtgttaaaagccgtcgcaataattttttcaccgatcgcaatccccgctttaaagagttgcttggagcccatttgcgcgtcgtattctaagatttcgactaaaccactggcaactgcaatactcgtttcggcgattgcccctaagctgcccagaatgatcatcatgatactaattttttggaacgacaagccgattgcgagtccaaagccttcaatctcttctgcatcttccgcaccaaagccgtaggtagctgctaactggctgaggggcacaataatgatcagcaagcccaccaccacgattaacgacgtcacaaacgccgtcttggccgttaatggctgcttggtattcatgaagatggatgtcgctaacaaaatcagactcaacagaccactcacaatcagcggttcaaacccacccgccaccaagaccagtgccaatataatcacgacaaaattcaaaccaaggctgaagaaaatcgtcagcccttgccaaccacaaaccagcactaataagatcagtaaaattcccgttagcaacatcataggcgtctcacccgcactaactggcttgccaacaagctcgttactggcaccgccaaagtaatcccaatcgcactaatcaccgtctgcgtaaaacttaacgtgacagttcgcgataaggtatacgcaattgtgttgccattgcgtagatacaataaaataattggaaaagcatccgccatgactaaaaagaacaacacattaactaacggaccaataatttcgcgaccaattgcgagtcctgatttaaacaattcagtcttcgtaacgtttggccgttcaatcgctaattgctggagtgacgatgaaatatcggtcgtctcatccatcacagcgcctaaaatcccgagcacgacttccgctaagaagaccgttttatacggctgtaattcataggccatcgtttcataatgcaagccttgatcgccggttaatttcaagacggccatgctgagaaacagtgctaggaacgttgcgccaattgtcgcgccatatgagacaagcatctggcggttgagtcctaatactaaaagtagcgttaaacccgttagaacgaccgctaagccacacataatcggcaataaccaccgtccacccgtcatcgcgtttaaatggagtgttaagacgaatgcgacgagattgaccaagacactgattagcgtcatcaatccgcgcttgagcatcattagtaataggaaactaaacgtcaacagtgttaagccaacgatgattgtatcgcgcttaggctcgtttaaggtccactttttcaaatattgatcacggtgtaaaaagacttgttgtcctttatagtaccgcgtcgacatcgcttgcgacgccgtatacgtattgcgtagcgtaatcacttgccctttttgcttagtgttcaaaaattggcccgtgacccgctggactacttctgtatcttcattttggtactcatcagtctgtttctcacggctaattgtctggacccgcgttacccgaataatcggttgctgatacaaaccagcatcgaaatacgtccctaatacaccgaggacgcagatgacacttcctattagaccaatccacagccgtttatgttttaccacagtcgtcacctctgttttattctagcgtttctgcgggtgaacgtcagctttttgaggctgatttaatcattatttaagcgactattgaaaatcccatacgtaaagtagaccactaagccgatgacaaaccagattgccgctgcaatccaagtgacttttggcaattcaaacatcatcaataaacatagcgctcctgatattaacggtaaaactgggtaaaatgggactttaaacccatttttattcggaatgtccttgcgcttccgcaatgggatgaccccaatcgacatccagaaaaaagccaccaatgtgccgatgtttaccaaattagtcaattgatccagtgaaacgaacccgcctagaatcatgatgactaccgtcacaattttgatactgttagttggggtttgatgttttgcagtcactttaccaagtgcttttggtaataagccatcacgaccaattgaatagatgaggcgggaactgctgtaagtcatcgtcaacatcatcgtgaacatccctgctaatgcgccgagtgaaatcagaccggcaaaccaattttgatggacgacttgtagcgcgaatgtgaccggattagcaacgtccaattcgcggtacgacaccatccctgtgaggacaaacgccactaatatataaagcaacgtacagatgattaacgtcccaataatcccgataggaagatttttttgtggattcttaacctctgccgccgatgctgacacacagtcaaagccaaggtaagcaaagaagacgagtgatgcccctttgaaaatcccacttaccccaaacggcatgaacggttgccagttagtgggtttcacgtagaaaatcccgacactaatgaaaagtagcactacgcctaatttaatcaaaaccatgatgttattaattcgtgttgatgaacgagtccctcgcattaataatgtcgcaatcaagcccactaccagcatcgcaaacaggttcacataagtgccatgtgccggatcaaacgggccagtaattgcatgcggaatatggatgccaaacccttcgataaatgatacaaaataagccgaccaaccagttgaaactgccgcaactgacaacatatactccaagaataaagcccagccaagcagccaaccgattaactcaccaaaaataatattgccatatgagtaagcacttcccgcaactggtaatgccgatgaaaattcggcgtaacacatcgccgcaacggcacaaacggccgccgcaatcataaatgaaatcgtgattgccgggccactatgtaacgccgcaatcgttcccggtaagataaaaatcccggtcccaatcactgcccccacgcccaatgcaattaaatccttagccgttaatgttttggccaaccgctgatcttgttgtaaataacgttccagtgattcttttcgtaacatctttgccattaatcccattttaaccactcctatttttattgtatgcactcgactaggcgattactcgccgcctaccaggcttcgtcgcactcatttaataacaaaaaaaggagcccactagtcttcactagtgagccccaccaggaagatgactcggggttacccagccatcttccaattcattaaggtttgtcatttcaactcaaatgccttctccttaatcaaccagtcgattactgggtatcttaaagaaaaagctaaaggcaacacgttgcattgaattcatgacagaccctccttgttattaattagttacttagtataggggataaccatctatttgtaaaggattattttaaaagttgtttttctaaaaataatctgctagaatcaaatttaacttattcaaaggatgtgactggcattgaaaatcgcatgctaattttctgacaactcgattggtacgaactgttcatgcacgtgcgtggaccgtttatttccgattgccgttagagattgcttgcgttaattttcaggtcagttacctaaagacttgttaaaagacgctgttattgcgtctttttttgtgcatttttaacgacaactgggccaatctcattcaatcaatgaggtgataattcatgggcacaattcaattcaaagcactcacatttaactattcagatcaaacacaaccgttgttcgatcacgtcacgcttcaattcgacgccagttggaaactcggtttaatcgggcgcaatggtcgcggtaaaacaacgttattaaaattacttcaacaccaactaccatttgatggccagttggttaccaatctcgattttcaatatttcccacagactgttacagaacctacgcaactcacacacgatattctaatgcagctaggtaacctcgacaattcaaccttctggcaagtcgagcgggaactgcggctcctacaagtcgcacccgaaatcgtctggcaaccatttgcttcgttaagtcctggtgaacaaaccaaaatgttactcgccttactattcatcgacgactatcattttcaactgatcgacgaaccaaccaatcacctggatcaagaaggccgccaagtcgttgccaattatttacgccaaaaagccggcttcattgtcgtcagccatgaccgccatttcttaaaccaagtgatcgaccatgtcctagcgattaatcgtgccgacatcaccgttcaccaaggcaactaccaaacttggcaaaccgcccacgaccaacaagctgcttatgagcaacaacagaatcaacaactcaagggcgatatcaaacggctgacaaaaacagcacaacaaaaagcgcagtggtcccacgaagctgaaaaagggaaaaacgccgccagtgtcaaaactgaaagtgccaatctcgataaaggcttcatcagtcatcgcgccgctaaggttatgaaacgggcgacgacaattgccaaccgcgcggaagaagcaatcgaagcaaaacaacaactttttaaaaacgttgaaattgctgcaccactgaccatcaatcagcgacccctcaaacccggtcaaaatgtgcttagtgttgatgaacttgtcttacaacaagacggcgtcatccttaatcaaccactctcattcaccttagaaactggtcaacaggttgccctaactgggattaatggcgcaggtaaatcaacactgattaaggcgttacttgcattacccgcaactgaccacattgccagcggtagtctgcaccttaatccgcacttaaccctctcgtatcttccacaagatttcgatcaactgagcggctcactggccgacttcgctgctgcgaaacaggttgatcacgaacaactgctaagcatgttacgcaaactgggttttgaccgcgatttatttacccaccgtctagaaacgatgagcatgggacaaaaacgtaaagctgcactggcacgttcgctctgtgaagaggctgactgttacctctgggatgaaccgttgaattacctcgacgtcatcacgcgtgaacaagttcaaactctaattgccgagcaacgcccaaccctcctatttatcgagcatgatgttgatttcgttaacgccatcgccacccaaacctacgcacttcgaccacaacactaatccgtattatttgtataccgtgtcacgttatatccgcgcacgttgaagtaagtcgttggcgactcatcatcaaaaaaggccgggttcatatcattaagtcgcgtttcggtattggttaacgtttgttccggcagtgctaaattttcacggagccgattcgaagcagcctgcaaatcttctgtactaatgatttgataggtactgccgttaagccacgccgttttacctagcaattggctgctgacaatttcaccactactttgatgatagttgcgaatcaactgcttcacttggtcggctgtaaaatcagtgctaattttctgaccaagcttagtcattaagtcaccaatgttcatcaaatattttggcttttgaattttttgcgcaacctgtttcaaaacttcttgttgccgcaattgccgcccatagtccccgcgcggatcttgataacgcatccgactataagcaagcgcctgatcaccattgagatgatggtggccttgtggaatcacttgtccattcaaattaacgtcgatcaccgtatcgatggtaatccccccgacaaaatcaaccaattctttgagtgcgcccatatcgaccgtcaccgagtagtcaatcgggagccctaaaaactgactgactgtttttttcgccatcttagccttgccaatttcataagccgcattaattttctgaatattaccgccgtggtcatctgccatctctgccaatgaatcacgcggaatcgagtagaccaccgttgcttcttacgccgggttaagtgcaaccatcatcgaatccgacagaccacgatcaacgcgcccatccgcgcctgtgtcaacgcctaataataggaacgagattggctttcgctgatcaatttgttttgaaattcgactagacccggttttaatcgcatcaacagctttatcctcttgatgcaaataaaaacctagcgccgccagactaatcacaacaatactactgattacaatcacgatactgatctttttcacagtcaattcccctttgtttaaacgcccaccgcatccttttttagatatgaaccaataaatgctgtcccccttttgaatcgttcgattctggcggacagcattttattttaacctttgctttaaccgacgtaagccaactagcatgaccggcgctaagtgcgaccgattaagccatcgtagccaccgggatgtgccggttggtaaaccacgttctaaattgatcaattgcgtctgaatgaattgtcgctcaggaacagtcagtgtgcgctgatcaaaaacaattaacattctaaaaaaggtccgcacatactgctttaaaaatcgtgtgtaagctgcgcgatccacttctgcaattccagccactaattgcgtctcaatgatgtgcagagctgctaagttaactgagaaccactgcggctttagggtactcgtagccgcctcagcatgccctatctcgtaaacatataaaaacgctgcccgatgcctaacaactcggcaatgttgcaaatactgcaagttgaaaattaaatcctcaccgatacgcagcgattcatcgaaccgcaatgcttcagcttcaataatcgctcttcgatacaatttattacatgattgaaagaagacattttgataatagtagtctaaaaaagcccttttgccgtcttgtattgatagtcaccatcttcagtcaaaccaaaagcagaatccgttccgccggctctttcgattttagttctgaatagcacccaatctaccgactgaccgacgactggttcaaataattgggcactgttaaccaagaagtcatcggcattctcagcgtcaagttaagcccataaactaatcagccataaaaaggctgcatcaaaattacttttgatgcagcctctggttcaagcatagactaactacgctttgtttgttattaatctaatttccgttccaactcactaacaatttcagcatgttttgcttccgttaatttaatcttagccatgaagattaacgctgaaataaccaataacgccattggaatgaagaacatgtacattttgaattgcaacaaccccgcgttagtgatatcgcttggtttcgcattcccagtcatgccagcatgaatcgcagccgttacaacgacgccgtttgcaaaagccccggctagtttatccaataaaggtcgcactgccaatgttacagattcattccgtgtaccacttttcaattgtccgtattcaacactatcggtaatcgtcatcaaagcagccaaaaagaccagtggatatgggaagaagaataagccgaccgcaattaagactacgaccaagttacttccagcaaacaagaagaggatataaccaagcatcatcattgcgattccgccaatatagattgcccggcgatgaattaaagcaaccaatgttgggaacaacgcaactgacacaatccctaagatggcagtaatcacaccaaccgttgagaacgctgcggcgcggcccatgacatatctaaaataatataaaagcagtgagttcgtaatcacataactaaaggcaaataagaaatatgaaagagataaccacattaattggtcatttttaccaatcacactgaaaacgtcacgtaaccgaaccttttcagtattttcccgaatagcactcttttcttctttggttcctaagatggtcgctaaagcgcctaagaatgaaacaaggccaatgacaacggcaaaaccgaaccacccggcactggtttgttcactcccatgactcccagaaaatagttgcgagaagaaaaccaccattggcacgatcacgataatgaccccttgtgcacctaaagtggatccgaaacgcgcaatcgccccaaattttgtccgcttttcagaatcaacactcagcgctggcaacattgaccagaacgagatgtctttaaacgagtagaagatatctaaaatgacgaaaacgattgcaaaaagaactaagtaaagataagggctacttgtcgcaagccctccaaagttggtaaaaatcatggccaagccaacagagctaataattgaccccgccagtaaccacggcttaaatttcccccaacgcgtccgtgtattatcaaccactccaccaatcagcggatcgaaggcaatttcaacaatccgaatgaccatcattgtataagtgacatacgcaatcatttttgaattaaagcctgcatttttggtatcgaataattgactcgtgacgaacatcataaaataagtgctaagtgttgcataaaaggcgtcatgcccaaaggccccaaaagcgtaagaactatactgtttaacatcttttagttttttcatttctttagattcctttcgatagtttcttcattgtaaacatgctttcatcaagcacaaccctcgggttatcccgcttgatgacgcactctagtgatagcgatgttcgataattttttccaaaatcgcttggcgttgcttttctttggctgagccgaattggttttcttccaatgaattaaaatcgttggcgagtaaaactgattctagatataacgtcaattgacgcttgatataaaccttattgtcttcattcgtttgcttgggattcccagcgataattgctgcagcaaattggtctggatcgataataattttgttgtcgttcatcctagtcgcttctttctcttttagttagtaaacgtttactatttacaccatacaaataaatcaatctgtacaagaactatcctgtaaacgcattcttttagatcgcaatcttattttactaaacttttagtaaaatgtaaacggttatttggaaaccgttacattcatcactggttacagttatgaatttaatttcactaaatatttatttttttattttttattgaaatttaatttcattagcgctatactgcatctatagaaaacgctttaaaaagaaaggagttgctttatgtttggtttttctatctatcttaatcaaccgttcacctcagcaaaccgcatgaaccttcaaaaaatgcacgccgctggcttcacagaagtcttcacgtcgatgcatattcctgaagatgacatttcacaatacactgctagaatcaaagcactcagcactgcgtgtcgcgaagaacacttacaattgatgattgatattgaaacaagttcattaccagcagttggtctctcacttaacgatcccgccgcaatactgtcctttgggattactggtttgcgaattgatttcggcatcgataattcaaccattgctaagttatcacaatatttgaagattgccctcaacgcaagcacaattgccgaacaagatttagccgttttacgcgcagctggtgccaacttcgctaacatagaagcttggcataattattaccctagaaatgaaaccggtttagaacgaacctggtttactgaaaaaaatcagtggcttaaaacgcaaggtttaaccattcaagcttttgttcctggtgatggcattttacgcggaccacttgaagaaggattacccactttggaagcccatcgttatcagcatccgcttgctagtgcgctcgatttattcaactgtgaaacagataaggtcttcatcggtgatccaactttagcaaaaaccactctagcgcaatttgatgcattctaccatcaacacgtcataaccttgtacatgcttaagtcagccccctgccccccttatctttttaaccaacatttccataatcggcgcgatgtcgcccgtgatgtcatcagattagaagaaggccggccactttgtcagaccacaatccaacctgaacagacatcagtacgattacgtggcagcatcaccctcgataaccaagactatggacgttatatgggcgagttacagattaccaaacatgacctacccgcagattctcgtgttaacgttcttggaaaagtcatccaaaaagatcacgcattactgccattcattcaggctggacaagccatccaactaaaggagattgattaatatggatttaagtcatttaacaaccgaaaaccgtaatcaaaagacaatgcaattggacgaactttcaattgaaaaagtactcacactaatgaacgaagaagatcacaatgtgccagaaagtgttaaacaagcactccccaatattgaagctgctgttcaagttatcattcaaagtttccaaaatgagggacgcttaatttatatgggcgctggaacaagcggtcgtcttggtgttctcgatgccgccgaatgtgtccctacttttggaacagaaccggaactggtccaaggtttaatcgccggtggtatgcaagcaatgaccgttgccgttgaaggggcagaagattcaccgacattaggtcgcgaagacttggaagcaatccacttaaccgctaacgatacagtagttggtattgcggctagcggccggaccccatatgtcatcggcggtcttgattatgccaaccaaattggtgccagtactgtcagcttagcttgcaacttcgatgccctcatcagccaacatgccacaattaatatagaagtcgaagttggtcctgaaattttaaccggttcgacccggctcaaatcaggtactgctcaaaaattggtgcttaatatgttatcaactgcttcgatgattggaattggtaaagtctacaaaaacttaatggtcgacgtgaaaccaaccaacgaaaaattagttgaacgtgccaaacgaatcatcatggctgcaactgattgtacttacgatgttgcggcaacccaatttagcgccgccaacgaagacgttaaactcgcaattgttatgattttaacggatttatcggctaatgaagccaaagaacgtttaacacaagcacacggttttgtacgtcaaactattcaataacaaaccttaaggaggcactattatgactgaaaaaaaagaagtacgcttagccagagaaatttacgccgctgttggcggacccgcaaacgtcgctaaattaattcactgtatgacacgtgtgcggatgacaattcgtgacgatgatcaagttgatatgactgcgttaaaagcaatcgatggcgttttaggggttgtcgaagaagacacgcttcaagtcgtcgttggtcctgggattgtcaataaagtcgcccaaatcatggtcgaccaagtcggtgttaaacttggtgaacccttcccagaaaatctcaccacaactgccacagccgcaacaatgaccgaccgcgaaaaagtcgaagcaaaagccgctgaagttaaggcaaaacaaaaagcaaaacaaaagagtacgccaaccaagcgggtcttaaagtcgatttcaaatattttcgttcctttaattccggttttcgtcggcgctggtttaatcgggggaattgccgccgttctatcaaacatgatggtcgctggatcccttggttcaaactggtctgaattcattaccatcttaaacgtcatcaaaaacggcgtcttcgcttatctcgcaatctatgttgggattaacagtgccacagaatttggtgcaactcctggtttaggtggtgtcattggtgctgttacacttctaagtggtgttgatcctaagttgccattacacaatatcttcaatggcgatcctttatctgcaggccaaggtgggattatcggtgtcatcttcgcagtttggattctctcattggttgaaaagaaattgcatcaatttattccagattcaattgatattattgtcacccctacaatttcattattattaattggggtcttcacaattttcatcgttatgccggtagccggtgtgatttcaaattcacttgtcggctcaattaattggattctgaatgtcgggggtgccttctctggtttcgcgctcggtgtactcttcttaccaatggtaatgttcgggctccatcaagtcctcacaccaatccatatcgaaatgatcaacaaaacaggttcaactttacttttacccatcttagcaatggctggtgctggccaagttggggccgcacttgccctttggattcgttgtcgtaagaataaagaactcacaaatatgattaaaggggcgcttcctgttggcttcctcggcattggcgaaccgttaatttacggtgttactttaccattagggaaaccattcatcactgcctgtatcggtggtgggattggcggtgccgtcattggtgcaatgggcggcgttggtgcgattgccatcggacctagtggcttagccttaattcctttaattacaaacggccatcaattcgcttatatcttaggcttgctcgcagcttatgccggtggctttgtcgcaacttatttctttggcattcccaaagatgctacaatggaaaaataacctttaaaggacgctgattttatggaaagcatacttttttcaattcaaaagaaactcccaactttaaccaaaacagaacagcggcttgctcaatacgtacttgcccatccagtacaagtaccgacaatgacaactagtgcgtttgcaaaagcggctaacgttagtgcagcgactgtcgctcgctttggtaaaacactctgtggtcaaggtggctttccagcactcaaattacgactttcatctgaagggaataccgatcaacggctcttcgatgaaattaatccgaccgatacaacaactgacttaaaaaataaactaacttttcgaattaaccaagcgattactgaaaccaatcatcggctcaagaatgacgcgctcgaagaatccgcaatgattctccactcgaaacaaaccattttcatttatgggcttggtgcttcaaacgttgccgctgaggatttacaacaaaaactactgcgcgttggtaaatctgtcattcaatcacttgatacgcatctactggcagcagcactaaccacacagaaaacacaggcagcacttatcttaatttctaactctggcgaaaaacaagagcctctgcaacttgctaaaattgcacaacaacttaatattccaattattgttttaactcataataatcaaagtcaaatcgcacagttagcaaccatcacgttacagcatgatgatagtactgaaaacagtcagctaagaagcgcggcaacgacttcattaattgcacagctttacgctgtcgacctactctattacagtttcttagaacaagatttcaccgctaatacgaaccaattagctgattcatcgaacgttatcagcgaatattttactaagtagaaggagtcatcattatgaaactattctcacgtaaacccaaagaactcgaattacacgctattgtagatggacccgtcatcccgctcaaacaagtaaccgacgccgttttttcaacaaaaatgatgggtgatggttttgcagtaaaccctagtgatagtcatatctactcaccagtggacggtattatctctagtgttttcccaacaaaacacgcacttgggattacaaccaaaacgggcgttgaattattactccaccttggcttggataccgttgaattaaacggtgcgccgttcaccattcacgttcaagaaggcgatccggtgacaacagaccagttattagttgaaatcgacttagctgcgcttgcttctgcgggtaaagaagcaaccagtatggtgattgtaaccaacatagacgatatcagcggtgttaatgcccccctaacaactagcggacaccacggtgaggttgcacaaatcattaacttataaaaataatatagaaaagccccgctcagatgagcggggcttttctatattatttggctaagactgttatttgattattataacatgcttgattatcaaactgcatcaatactttagtcgctagatcttgcgttgcaaaaactaatctttcaactggcgtatttgccacgttgtaagccatcatgtgtgaaaaataaacaaactgtaacatattactgtatgccgaagcatcgccttgtttcacaatttttttaacgaaaaaattaacgatatgatcgccaaaacgaacataacctggaatcgaaatcagttgtacgttggactgtttagcagcctacacacgattggccgcattatctggcgcgtaaatgaccgttgtccctgtcgtttggtctgttggttgcattgtaattaaagctgtttttgacattaatagatactcctcttaagtgatgataaggtccattgtaccagagattaccgtttattttagtaattctagaaaacggttctgccaaacgttttcgtaaaaggcaattgtctgttcagccgtcatataggcgttgtccgttgtagttgaaagaccagctaccatttggagttggtagcccaaatggtgggcaactttaatcgttgtatcgacgcagtatttggtctgggcaccacaaatttcaagcgatttgatttgcatttggctcaataacgtttgtaagtttgtctgccaaaatgaatccgcatgcgttttttgaacaaagattgccgttttaggcacattcaattctggcattatctaccaagtcgactgaccagcaattaaagtcttatcgttatgttggacaaaaataatcgggcgactttccgcctgataggcatcaattctggcattaacgcctttaattaattgattaagacgcgcaacaggctgctcacttttgcagacaccattttggagatcaatcactaataaacaatcggctaacttcagcattagtcccctctttcctttaaatcaaatcgagtatatcattatttaactaaacttcatattttgtctgacgatattaaaaggaagagatgcggattacccccacctcttctttttcaatgtctccgatgtttttcccgcttcttaatctggtgttgctgaaaacggctgtattgtatggccttcttttcggcatgttgttcagccctattagttgcatgttgtgctttacgttgacgacccatccgaatctttttgttgataccaacgaattgaataccaatgataactgacttggcaccctcaaccacttgcatttaaacaattccttcacatgattatcgctcaatcccccactttcccgccaaaagcgttatactatggataataaataaaaggagtgttttgacatgcaaaaaccaattaaagggtcatgtaccacggtcttagtcggcaaaaaagcttccatcgacggttcaaccatgatttctagaaatgatgatggccacgaagctttggatccacaacgctttgttgtggtcaatcctgaagaccaaccccggaattatcaagcggtgattagcggcgttcaaatccaattgcctgataacccaatgcgctatacctcaattcctaactcattattgacgaacgggatttggccagctgctgggattaacagtgaaaacatcacgatgtctgccacagaaacgattaccactaacccccggattcaagggcttgatccttttgtccctggtggcatcggtgaagaagatattgtgacattagtcttgccttacatccacagtgctcaagaaggggtcgaacgtttaggcgccctccttgaagaattcggcacatacgaaccaaacgggattgccttttctgacaaagacagtgtttggtggcttgaaacaatcggtggtcatcactgggctgctgttcgcatccctgatgatgcatacgtggttgcccctaaccggatgaacatcaatcatttcgactttgattcagccgacacgctttgctcagctgatttaaaagctttaattgatgataaccacttgaatccagactttgaaggctacaatctccgtcatattttcggcagtgcttcaatcaaagatacggtttataacaacccacgaacatggtacggtcaacaatacttcaatccagaaatcaaacaagatccaatggaccaagatttaccattcatctgccatgccaaccgcaagatttcaatcgaagacgtcaagttcgtcttgagcgctcactttgaaaatacagaatacgatccttacggtagcgcccctgaagatgttaaaactcgtttccggccaatcggaattaaccggaatcataacgtgcatattttacaagtgcgcaacaacgtgcctgctgaaattgccggtattcaatggttagcttatggtgccaatacgtttaacaccgtcgtgccattctacacgaatatcaacgacacaccagaatcatacaagaatgccacaggtatttttgacttgaacaatatgtactggttaagttgtacaaccgccttacttggcgatacagattacgacttctacgttgatatgcgtaacaccttcgaactcgaagcaatgagtgcctatcacgtgatccaaaacgaaaccgacaaggccttcgctgatcaaaaagacgctgcagccttcttggaagccgctaataacaaactagctagcgaatcacttaaacgccaaacagccctacttggccaaatggtgatttcaggctcagaacacatgaaattacgctataacttgaacgactaataattatttaattcaaaaaagagcgtctcagctattcgttagttgaaacgctcttttttgagttgtcctcttttttcagtagcgtataataaatactattactcaaaccacactaaggaggcatttatcttttgaaaccccaaaaattaaaactatcggattacttactcggctttggattcgtattattgatggtcggcattgccactgtcttgaacgatgttgagattattctacccgaaatcgcagccttaacaacggggctgtggatttatcacgaaccgggttggctcaatcaacccgccaagatattttggctgccatcgataaccgccatcgttgggtttggcattaatcggttgccgctcagttatgcagttaaaattagcttactactactcatcatgattgttttactttgtttatttcgctcaacactcgcaccatcgtttgcaacggggctgttaccgattatcgtcaacgccactgaactttcattcatcattgcaattttaggctttacgctcactttgatgttggtcgttagcctccgcaaattgcatctgcaacatccctatcatgccacgattaactatcgcgtcatgctggtttttctaatcattgcactcttatgggtgttagttgttagtttactcggccggccacagatggctgccattccgccggtacttgtcgtcttttttgaaattctacaaaaaccaatgtatccaggtaaaatggccatcaagcagatggttgcattaactggcgccgccacaatcggattcgtcgcttatagcttacttgattcacggttattggtaaccttaattgcactgccactagtttgggcattactctatctgctacaagtcagaattcccgccgcctacgccttccctttattggccattattctcccacaccaaatgtttcaaagtttgccgctcgtcactttactggcaactagttactttttgggggctgcttatttataccagcaatacattaagccgcgtctcatcagcagataacatgacggtttacgactaatgagggccaaccgtgggcggataatcaacattcgcaaactgctggtcaacgcggtcccgttttaattcaggattattaattgctcgaaaaactcgcgcattttaatcgtgaacggattccagaacgggtcgtgcatgctaaaggcgccggtgctaaaggttacttccaactcactaaggatatgagcgcctacacaaaggcagccattttcagtggtgctggtaagaaaacaccaatgattgcgcgcttctcacaagtagctggtgaagccggctatcccgatacttatcgtgatgtgcgtggatttgcccttaagttctataccgaagaaggcaactatgacattgttggtaataatacgcccgttttctttgttaatgatcctctgaaattccctgatttcattcactcccaaaaacgagatccacgaacacacgcgagaagccaagacatgcagtgggatttctggtcactttcacctgaatcagtccatcaggtgacgattttaatgagtgatcgcgggattcccgctagttatcggatgatgcatggctacggtagtcatacctttaaatgggtgaatgctgctggtgagcagttctgggtaaaataccacttcaagacaaaccaaggcgtccataacttaagtaacgaactggctgccgaattggctggtaaagatacagattatctacaaaatgatttattcgatgcgattgaaacaggcgaccatccaagttggaccgttgccgttcaacttgttccttatgaagctggtttaaactatccgcaagatatctttgatgtgacgaaggtcatttcacaaaaggattaccccttaatcgaaatcggtcaaatggtactcgatgaaaatccaaccaacaactttgaggatatcgaagaattggctttctcacctgctaacttagttcctgggattgaagcttcccctgacaaactcctccagggacggttgttcggttataaagatgctgaacgttaccgtctaggtgccaactatgaacaattacctgttaaccggccaaaagtgcccgtgcataattacgaacgcgacgggatcatggcaaaaaaccaagagacaggcgtcaactatgaacctaatagtgaagatggtccaaaagaagtcccatctgccaaaattcatggcgaccaacttagcggtcaaaccggtaactatccagccgatcccgattactattcagcagccgataagctttacaacttactaactgatgaagaacaagatcgactaatcgaaaacattcgcttaaatctcggccaagttacaaaacctgaaattcaaatccgcgaagtcaaacagttctaccaagcggatccagaatacggtcgccgagtcgcaacggcattaaatttagatttaaaccaatttgaacactaatctatacaaaaagaaggtatccggcccaccggataccttctttttatttatcttcttttggagaatcttgttttgctgcccattctttcttggtcatcaagtcagagacattcattttaatcttcgtcacgtttaaaccagtcatttgatgtactgatttagcgatgcgttcaattgtttgttcgaagatgtctggcgctgatttaccgtattccaagatggcatccaattcaatcgttacttcttggttatcaatatcagcgtcgacgccctttgtcggatcttcttggtctctgaaacgatcagctaattgactcatcatcccgcctgataattctaagacgccatcgatgtcatgcaccgtttggcccgcaattttttcaatcacaccatccgagaagttcaattctttttcgattttttcggtatgttgatccattgtcttatccatcattttatccattggtttgtttggtttatccatcgttttcatcatcctttactatttttattgaacgcgtttttcagaatcacttttctttggattactgccttgttgttgccattctttcttagtcataatgtcactgacatggctgttaacttcgacaacactcaaaccggtcattgattcgacagcttcagtcactgcagctgttaatcgttcgaaaacatcccgtgcattccggccgtattccaaaataatggtcatgtcgattgcgacctgtttttcgccaacttccacactgatgcccttcgttggatcactatcgtttctaaaacgatccgcaatatcactgaagaaattaccgttcatcgataataagccatcaatgttttgcgctgtcttaccagcaattttggcgattacagcatcttcaaaagtcaatttgctattggccatcacttcatctaaatgtgcttgttctaccattttgtcacacctccgttatttatcctgcttcaagacccggttaacttgtgatctaaatccttctaggtcttccttagaccctgttaaactagctgcaatgtagccgagtaaaccagcgatgataatcaagattaaactcataaatccaaaactaatccaaatggctgccaacactgccccaacaacaaagccccaataagaacgtctcatttgtctcacctcacatcactttttgcctgattacttagcggtgatagtttgacattcactgctttaatcggcatctcaaagattgtttgtaatgcttgctgtaccgtttctttaactgcccgtgcttgttgatcgagatcgttgcgatccactgcgaccgcttgaacgtcggcagtcacttttggatgtcggcctttaaacgtcgtatggactaacacttccttaacacggtgtttttcaataatagcttgtgtcactgttttttcaaccgctttgcgggaaagtgctagttcacctttatcggtcttgatgatcatttggcgttttttcggtggactgaataatgccaatagcagtaaatataagaaaattaagccgctaagcactcctaatccaagtccaaaattaccgacccattgttcgggtagccaactaagatgcataaattgcttattggattgttgtagtggatagattaatgtgataaaccacgctacctgacacaacccaagcaaactggctaaactgatcaccactttagttaatttattcatggtgtccgcccctttgtattaggattttctacgtgtgaataataatgaaacaacgaaaacgacaatcacggcaccgataatggatggaattaaggccatcccggcaagctgtggtccccagctgccaaacaatgattggcctagccaggcgccgactaacccaccgacgatattgccgatccaacctgcaggtaaatcacgacttgtcaatgcccccgcaatcaccccaattaaagcgccaataattaaaacccataaccaatgtaacataacaatcatcctttcttgtttccttaaaatatattgctggttctccataaatgtaacaaattcaaccagcatccgtaaaacaatacgcttatcaatattattaaattatcgtaaatgcacttgtttaattaattgattcgccaccggtaacgccgtaaatttgaccggtaatatagcttgctgcgttgcttgctaaaaaaacatatagcggtgctaattccgccggttggccggctctttctagcaatgtattctgcccaaacttaggcaaagccccttccagttgtccttgagccaactgcaacggtgtccaaatcggacctggtgcaaccccgttgacccgaatacctttatccgctaattgttgcgctagattgatcgtaaaattcttgattgctgcttttgttgctgcataatctaacaaatgcggactcggattaaaggcttgcactgaagtggtcgtcagaatactgccgccagccggtaattgaggcaatgctgcttgcacaagcgcatacatcgcaaccacattaacgttaaaactatcttgaacttgttctattggtaattcggtaattgatggatgcgcaatttgttgagctgcgtttaagactaatgtgtcaagtgtgccaatttgctgctgcgcggtttccactacttggctagcaatctgtggtttccgaaaatcagctgggatcaatgcgattttacgccctgcatctcgcaccaattgagccacttcttgtgcatccacttcttcacctggcaaatattgcaatgcaatgtctgctccttctcgggcaaacgcaattgcaactgcgcgaccgataccagaatctcctccggtaatcagcactttacgatctagtaaccgttgtgcaccatggtagtgttcttcgccacaatctggcttgggatgcatttgatcttgcaatgccggactagcttgttcttgttcttgaaatggctctgtccgataaagtgttcgcggatcttttaaatctggtttacccatcttcttgttccctcttttccaattaatctagatacactgcttttaaatgttcaatgtcctgcgttgttaatcctaaggcctgttgtaaataggcttgagttgaaccataatcctcattgattatgcgctcagctgtgcttaagtaggactgatcaacactcatcaatgcatgcatactttttaaaaagccgcttgaggcatctttttgacgtagcgtcttaatgcgggctgcaacgtgttccctagatgctgtattcgataatagataatcatattggatcacatcttcaggtgccccgagtgcatttaataaataataagccgccattccggtacggtctttgccacctgtacagtgaaataaaactgcttgttgcggatcggcttcagtcaataatcgttcgaagaattggcgatacattccgattgaatagggatcttgcaccatttctcgatagacttggcgcatttgttgctgcccaccaagcggattattggtgtagcgctcataaagttccgcttcactcgccgtactttgcgtcgcatcttctttaaaaattggcaacgattcgtaagatgccgtcgtaatctttttatctggcgcttttttgcgctccattggtgaacgaaaatccacgacataggtgatatggtagctttccaagagcaccaattctctcttactaagattcgccagattccccgttctgaataatcgatgcggtttaatcgagcgaccatccagtgtttgatagccacctagttctctgaaattgtagccatttttaattggtaatatgcgcgaaaccatcgactcatcctctctaatcaaccactttggctgctaggatcattgattatcatccaatttttgaagacacctttttaccgtcttgttactaaaaacacgaccacgatgatcaaattccaatggcccccagctctcaccgacgagggcctcaccgttattctctcttaaaattgcttcctccaaatcagtcataccttctagaaaacactttagattggctgattctttcttaatcaccaagcacaattctggggtcttgactgtactacgacctaacctaactttcctaattcggacttctttttgcataagcaaccttcctttcatgaaatctttaataacgctacaccatcaatataaaacaatcacatttattgatgcaacttttatgattacgttttgttattgttagcataatcatttacctttacaaagattgttgaatttgtttaaataaagacacaacacctaaaaggagatggttattatcaacgctattaatatcatgtttgccgcagatgaaaactatggtgatcaacttttaatcgccgtaaagtcggttctaacccatatttcgcccaaaactactattaatttttttattctcgataatgaactcactccgcaaacgaaacacgctgtttccaagcgcgtcccacgccccaatcaagttgagtttattgcacttaataagcagctttttgaaaactgtcctgaaagcaaccatatcaacaaaacggcttactaccgcattttagcgccaactcttttgttgcgaaaaaaaatcgaacgtgtcttatatttagatgtcgatatcctcgtacaaactgatctcacgccgctatacaatacgcctttgggcacaaatatcgtgggtgccgtgattgatcctggacaagcactcacactgcgacggctcggcatcaccccaccacaatcgaataacatctacttcaattcaggggtcatgctaattgatacggttcggtggaatcatgcatccatcacagagcggactttccacttcatcaatcatcatgcggatcgcttacaattccatgatcaagatgcgctaaatgccactttggttggtaaagtgaaactactccatcctaaatggaacgtacaaaactcattgctctttagaaaacatacgcctatcaacactgaatatgcccatttatttgatgaagcaatcgccaacccggcaattgttcacttcacaacacacgagaaaccttggaacactctaaaaagtcaccccttcttaaaccaatatcaaaaggaactcaaacaattacatgcgcaacaatccgatataatcaacattgtatcggctgtcaattccgatttcatcgaaacgctggcaattctatacgcctcaattcttaatcacaatgactcacatcgacactatgctttttacgtcttagaagaccacctcaccgcacgagataaagcagtcttacagcatgttgtggctcgatttgatgccgacttgacctttgcagaggtcaacgaatctttactggccaatactgttgaaagtgatcggatcttaaaaacggcgtactatcggattctaattcccgacgtgttccctcacctcgatcgtgcactctacatcgattgcgatgcgctatgcctcacagatttagcccggctatgggatatcgacttaggccaatccttcctcgctgcagtagaagatgctgggttccacgaacgcttagaaaaaatggctatcgattaccaaagtccgcgttactttaactccggtgtgatgttactcaatctcaaaaaatggcgtcaacacaatattgtcagccgtgtactcgacttcatcaatcagcaccctgagaaattacgcttccacgatcaagatgctttaaatgcaattttgcatgatcggtggattcaccttcaccctatgtggaatgcccaaacaaacattttgatgaacaccatcacaccaccaactgaacacctcaaaaaacaattcttagaaacccaaaaagaacctgcgcttgttcacttctgtggtcacgaaaagccatggcatgcctcatcttcccatccattcacaccacaatatcgttactaccggcaacggttcttaaaacaaaaaaagcggctcgttcccttcgccaatcgccgttccctttctcaacaaggataactacaaaaaaagcgggtgcttagacaaatttatttttgtctaagcacccgcttttttaattgctaaaaattatctttttattgaccgactaagccatcatgaatcttatctaggttccacttcatcatcgtatagtaagtgtcaccttgcttccctctttgcgcgagtgagtctgtaaaaattttcgcataaattggtaacccagtttcctgagcaactttttccattgatttcggcgaaacagaactctcaacaaacagatgcttaacatctgaatctgcaatttttgcaagaaccgtcttcatctgttcaggtgtgccttgcgactcagtattaatttcccaaatgtaaaccggtgtgacctgataggccttaccaaaatacttaaaggcgccttctgaagtcaccaagacccgctgattagctggaatatcggcgaatttagtttgcgcatcagtatgcaatttgcgcaaacgtgcagtgtagcgatccgcatttttgcggtaatcatcagcgtgcgctggatctttggtctgcagcgctttcgtaatgttttcaacgtattgaataccgttcgccaaatccaaccatgcgtgtggatcgggttctgtttggttagttgtcaaatgttgcacctgaattcctttgctagcagcgaaaacatccttttcgaattgcttatgcgcgatcttaacaagttttctaaaccaaccattgccacccgtttcgagatttaacccgttatgaaaaatcacatccgcatcagtcgcttttgaaatatccgtcggttgcggttcatattcatgcgggtcagttccccgtttcacaatactgtaaagttcaatgtggtcttgaccaacattatggaccatatcttcaagaatcgaattcgtggtcactacacgtaatttagtctgctggttcgtttgttgttgtttagattgggcgcggtgctggatgaaaccatacacaccacccaccaaaccaaaaactgcaattaacgtcacaatcatttttttcatgctggtcgtcctcctttgcgccacttaaggaaaccttgcttaggcgcgcagatgaatgaaatggcaaagagcacggctgccatcagaacaatcgccggaccagatgcccagttcaatgtgtaactgaagtacaatccactgattgctgacacagcaccaatcccagccgataagaagagcatcgtcactaagcgatccgtccataaaaaggcggtggctgctggggtaatcaacatcgcaacgaccaaaataatcccgaccgtttgtagggctgaaaccgtgactaaggttagcaccaacattaaaccgtaatgtagcacctgcgtttttaacccatatgttttcgcataggtttcatcaaacgaggtaatcaataattctttgtagaagaatgagacgaataagatcactaagcctaagacaatcgccgtactcataatgtcgctatcactgacggcgagaatgttcccgaataaaatatgatgtaagttggttgcactttcggccatcgaaatcaggataaacccaagcgcataaaaggcactaaagacgaccccaatcgaagtatccgtcttaattttactatgtgttgcgacaaagccgattaagaccgccgctaaaataccaaatacagatgcgccaaccagcacattaattcccaacatgtacgccactgcgacacccggtaacaccgcatgtgaaatcgcgtcacccatcaacgacatcccgcgcaaaatgatgaaactcccgacaatgccagacatgatgccgaccattacggcggtcagcaacgcactctgcaagaattcataacgacccaacgcactaataaaagctggaatactcgtcattttgccacctcctgtgcatcaaacaagacagcggataagtccgcactaaaagcacgctcaatgttttgcgcattataaactttttcagttggtccataatcgacgatgccgtggttcatcaccactaaatcatcgaaatattgcgatactttattcaaatcgtgatgaatgacaatgattgttttacccgcatcacgccactgtttcatgattgccatgatcgcggtctcactctgtaaatcaatcccaacaaacggttcatctaaaataataatatccgcttcttggacgatggcgcgtgcaacgaaaactcgctgtaattgtccacctgacaactggccaatttggcgttgcgcaaattcgctgagcgatacttgttcaagtgccgcgcgactggcttgttttgcctttttacccggatcgcggaataagcctaacttgccatacgtgcccgttagcaccacgtcaaaaacgttaattggaaaatttaaatccaaatctttacgctgttcaacgtatgcgacttgcttctgaactgcgcgcattggtcgatcttgatataaaactgagccttgccgtgccttaaccaaccctaatattgctttaatcagagttgatttgcctgcaccgtttggtccaatgatgccagtgattttgcctgcgtcaaactgaacggcaacatcagtaaatactggtgtgtcatcgtaagcaacggtgaggttcttaactgataacataaagagcctccattcttttaggtaaacctaacttttctcactacagcatacatgattttaatggaattaacaaatattttagtttaggctaacttttcgggatttctgtggaacaatggcttaggatgtttcacgtaaaacataataaaagagtcgcgctatttttaaacagcacgactcttgttattaattagaaatcttcgtcagcatcctcatttgaaacagtgtattgataaatccccttttgaccagatgctaatattttatctgttaatgcatccaatcccaagttgtcacggttgatgaataattcaagtaacatcggtaaattaacacctgatacgagtcgatactgtggcgcatcccgaatgatatcaaccatcacattaaaaggtgtcccacctttaatatcagtcaatacaaaaatttcagatagtggttcaaatgatgcaaaacttctattaatttgttggcgtaaagcttctgtcgtttcccccatttcataagaaacaactgctaaatgcgcttgttgcccacaaatcatttcagcagcttgaactagacctctaccagcggcaccatgcgtacaaatcacaactccaatcatctctgttcctccagccattttaatatttcaattgacgatagtaacgtctaatttccattggatggcggttcaagtcttcgatgtgcacatcaattcgctcattgaccgcatgcaagataaatggtgataatgcaccgcggaattctggtgaaatccccggcatgtcgtaatctttcgcatcgataaccgtataattagcacagatttgtgggatgaagttagcaacgcgttcgctcaattgtcgttgactgtcttctgtcacgtaaattgtgactggtgtatcgcgttcaacaatttcgaacatcccgtggaagaattcttgcgcttcaattgattttgttctgagccaatgttgttcttcccaatagcacattgcatatgaatacgtagcaccccattggttaccagccccaacaaaataatgcatttcatcttcgtgatgtttcagtgcaaattctgtagcaaattcgtccgcatttttataaacagccacaacatcttttgcaaagttatcatccatttgtttgtagaattcgtcgtattgatcgaattcccctgctaaatacataaagcgatcacctaccatgaagaacttaagttgttcattcaatgggtatgaaattaaataatcacacatcgttgctaaatcggcatctgcacgatcaacaaacccaattacacgtgcaccaatttcattacatttcttgacagcttcgaccatttcttgcgtatttccagtaactgaagaaataatcacaaccgtgtcttttgtcactcggagattgccagttgttaagaacgaagctgcgttttcgtagaatgtttcaatttttgttctttctttcatgtgaacgaccgcttgcatggatgatgcataagtgccaccgatcccaatccaacaaatattactataaccctcatcattaatttgatcgacaattttattaatgtctgatctgagtgcaattccgccttctaagtttgccaataattcttttccgttaaatttcaacatctcaatttccttctttcaattttttatatttttgaatttgtaattggatcaaaatctggaaaagctgacacttttagattaatttgcttgcgcgctgatgcggtataagccaataagtgaattggaatagtcataaagagtggggctaacaactcatcagttggtaacgctaagccgaggtcgtcttgacgatcaacttggccattcgtaattcggacaaccttcgccacttttccggttaaaaatttttgtaacttagcgactcgctcttgtaacttcccgtttggttcaatgaaaatcacatgatcacttgcgtggagtccaatataagggccgtgcatatactcttcaacttccttaccgagtgcggtaatacgcactgtttctgtaatcttagtttcaccttcacgggccacaccgtatgtgccaccataaccaacaaagattacgcgttgtactgtatcaaacacatcgctataatgcgctacccattctttagcagcatcaatgatgcgtggtaggtcagtcacaatgttttcaatcgctgccaaattcgtttgataactcgcttgatcctgtttacccaattcaagcgccaacaacattaatgtcaaaatcgtggcactatagccagcggtcacatagggcatctcttcaattggcatccctagtggaatcacatgctgacttagcttggcaatcggactgttttcatcaccagtgatggtataaatccggccgttgattgcttgaacccgtttgaccatctcaatcgttgagtagctatgcccaccctgggaaatggcgatatacaacgtatccggttgcaggtgcaacatatagttcgccgtaaaagatggctcctcgacaaaaacaggaatgcccaattgctggctcatataaggctgtgccgcaaacgccgcatttgaactcgatccagttgcaaaaatcacaacatttttatatgccgttgatttgtcattcagtaacgtacgcaatatcgtttgccgattggctaatatatcagcatagattttcggttctgcttcaatgtaatgcaacatatcctgcatgcttgctgcctcctacttcagtagacctgtgtaagcaccaaagattccaattactgcaattaataatagaatccagtgtgctttcaagccttttttatctaaccagaaaataaagagcgtaaagagtaatggcaagatgcctggtacaatcccatcaaaaatactttgaacagttggcgcacctttacccgcaccaatcgtcaatggcatcttcagcgtcaccattgtcgccaccatcgatccaacaacgcccagccctaagacggaagcgccaaaggagagtttatccattaaacccgttttttgaactttttcgatgaagcccgcaccgatattgtagccaatgaataacccgtaataccgtgctaaaacagccggaatattgaagattaacaggaataacagcggccctagcagattcccttgaagcgctaaggaagtcccaattccggtcgcaattacccgcaacgtcccccagaagaaggaatcccctaagccacttagcggacccattaacgcaatcttgatattgttaattgcatctgtgtcaaaattttcatctaatgccgcttgttcttccattgctaccgaaatccctaatggaaatgtagaaagccacggcgttacattataaaattccaaatgtcgtttataggcgctcgttaatttttctttactgcctttatagattttatttaacgctggtgtcattgcaaacgagtagcctaaatttgattgtcgttcataattccaggcccattccatcgtgaaggagcgccagaaaaccttcatcaaatcttttttcgagattaaactagaattcttcatcttcataatcgatgcctccattcgttgtacttgcagcaactgtctcgcctttatgtccattattgaaagctgagtagccagttaataccaatgcaagacaagccccaaagatggcaaccccagtaacagggactttcatataaaccgctaaggcaaatcctaatacaaagtaaattgcattgtgtttattgaccattaatttcaacaataacgcaaacccataagctggtaataagccggtcgcaattcctaaaccatcgatgacaaattttggaataaccgctaatgatgacttaattactggactcccaacgatgaaagaaattgcaacgattaagccgattggtaaattgattgagaagaacccaccgaacaattgcatccgatccatgccctttgaattaccctcggccgcgtatttatctgccttatgaacaaagtatggcagaacaaagatgaagcacagattcttaataactagcactaacgatgcaatcggaatgcccaatgttaacgcaacggctgtactcttaccggcaccaatggcaaaggccgttcctaaaatactacctgaaataatttctggtggaatcgaagccccgattgaaaatgaccccacaaaggccagttctaaggttgcccccatgataattccggttttcatatcacccataattaatccagcaatggtacacgtcacaagtggtcgcgataacattgatgatccaaataaatattcagcattcgccaacatcgctgttaacgctaataatatggcaatcaatatatggttcatgagtttatcctccttttattctggtagtatcattttcttttcattcggtacttgttggataaagacgtctacaccagatttagaaagcgcttttaattgatcgacttctaaatcggttaagttaaccgccttagaataattcttcgttccttctcgttgttttgtgcccccaacgtttaacaatgtaatcttatcgcccgttcctttgattaatttctccgcatccgctactgattcaacaacaattaacaacttatatttatcggttgcgccagaattaatagcactaatactgtcatcaattgatttcatcactaacttcgcttgttctggcttcgccaagcgaattgctgatttacgaaagtcatcccccgccacactatcattagccactaaaatcgtattaacatctaattcgttaaaccaagaaactgcaacctgtccatgtaataaacggtgatcaattcttaaaaattctatcatgtgaagtcccccttaattaaaatcaatattaaattctgttgtatcagctggttcatagcgattcgaaatcccaatcactttatgattttcagcgtaatactgactgctcaatttaaagagcaacgcatcttcttctagatctaaatatttagcatgcgttgatgccatgctgacgagctgtaaatcttgctgcattccgtagaaattttccttagccgaattgacaagttcgatagtattgaccatctggatatccgcaagactcaaagtcggatataactgctgcggtaaaataatcgtttcgtaaacctgattctttttttcttgataaacatgtttgatggtatacaacaacgcgttgtcactgatatcaaataattccccataatatttatccgctttgcgaagatgaaattctttaatctgttttgctgcgttgcctaagttattattcttcatcacccccgtcatttctaaaatattttgcgaagaaatctggggtttaacgtatacccctacaccgtttttcttgataattagttctttagcaactaaattatctaaggctttccgaattgttgtccgacttgcaccaaataattgctgtaattcagcttcacttggcatcaacatcccacttttaaattcgctacgctgaatgcgagtttcgatttcgtctgaaatggtttcaaataagtattgtttcatcacaaatcaccatcctcacgataatcaaaaatatttttcgcatctaatcggtaacgaatttgatacccaatcagatactggacactatattcaaccggctcatcatcatgatcgtaagccaagcttgttacaatatataatggtgtcttctctggtatttctaatatgatagcctgtttcttatcggcatatcctgctttaatcgtttcatgcccgtagcctaagaccaccccatattgatccttcagtgtttgataaagggaccgattctgaaaagagatctgctcaatttctggaaagcgttcttgacttaaaaaagctaattcgtacgaaatgggtttcccattaatcattcgtttccgcggtagttcaaatacatgatctgccttcaaaaatcgaacaacatcttcttcgactggttcttcggtttgtgagacctcggtttgaatttcgtctggatttaactccgttgacattgaactcattgccagcatgttaatcacatgcttattgttaactgtcattcccacacgtggctttttttcaattagtccttcattttggaggactgataacgagcgccgcattgctgttcgactgataccatatcgctcagccaattctctttccgaaagattagcgaaggctcctttttggatatcgtatcgtaatcgttcctcacccaatgttgcaggtgagatttctttatattccaaagcgatccttcctttcaaattttaaagattaataactcttacaacctaattcactaaattaaaagatatagttttttatatttttaataccaaagtcattgtaagcgcttttttactttgtgtcaatcgttttgaaaaggtttttttaattggcatccattagttgattttgaatattggaaaatgacgttctagataaccagtgcattttaaagtttctaataatttattctcattattgcacatcaaatttaatgaatatatttcgtaattggcttaaaaacccgttaaatcggctttaataaggatttttaaagaactacttctctttaacaactacatgcaacagatttgcatatcgataaaaaacttgctaatattaactattatcagtaatgttgttaaatatgtatattaataaccattaattcaaaaacaatattaaccgtagattgtcggccatcactcgtcacataaaggagcgcgagacagttcttaaccgaataatgctaaaaatagtttctgttaggagtgctacctatgaaagatttctttttatccactaagtcaattacgttaatccgtatactagatcatattatccaagccaatgaagcacccatgcttcgggatattatgtatcatttctcactttctaaattaactgcaatttgctacttaaaaaagttgcaactagaccttgctgaattagacgccaatattcagctaacaacagtcaataaccgctatgaactcgattatcctgaaggaatgtcttctaacgcgattctttttgaacttcggttcgcttacattattcgaacaaccagctttcaagtgatggacgcgctttttaaacatcatttattagtaaccttttttactcagaaaaagtgagtcctttattttgaaaccgactatcgatcctagcactttttaattcgatcgcaaaaataatctctttttcctattcttctttggataaactctcaacatagcctggtacttgtttttgataggcctctgctatatcactaaaacgatactgagttcggtataccttgagccggttactcgtgattcacaattcttcactagtcggtagcgtaaaaattgcggctcgccccaaatcgagttcactgactttcggcgcttcggggtcggtgccaaaataccagacattcggtatcccatcaagcgtgacaaaattaatctgtcgactagccggttgtcccaggttgttcgctgtactcagcaccattgtattaaactgcttaacatatttacgaaactcgcttaagttattttgatacagctctgaactaaccggctgactatcaatataagcaatcgcatcatcaatcgtttctaatgccgggttagcctctaaataataaagaatctgtggaataatgtgggatatttctcgttgataataataaaactgaaaccagcgattagatactgataaggcctctgtataacgcttaacaattcgccgccgatagcgttggacgatatattttaacggtcgatatttaatcaacttttgaaagaatagtaatatggtgcaaacgactaagttaatttaataggttatcgcttccataaggtcattcaaacaaaaaaagagccccgctttcgcgggactctttttcacagtttaacgctgtgcttcatcttcgtgtaacttacgtaaaagttcgtcgatatgttcaccataacgcactgaaccgtcttgttcaaaggtgatttctggaatcttgtacaacttaatccgttggccaagttcgctgcgaatcaatcctttagctttatctaagccagcttgtgtcttttcagcgtcacttgctaagccagataaaatgctgtaataaactttaacatgttgtaagtcaccactgagattaatatcagtgattgtgaccccttcaactcggggatcacgcactctttttaataaaatgtcatttatttcgcgttgaatttcttgttcaacccgaccaacacgatgtttcattgcttgtcctcctgtaaattaattatttaacaggtacttcttccatcacgtaggcttcaatttgatcatcaatcttaatatcattgtaatcttcgattgtcacaccacattcaaagccagttttgacttctttaacgtcatctttgaaacgtttcaagcttgaaagtttaccttcataaatcacgataccgtcacgaattaagcggacaccactatcacgttggataacgccagtgtcaacgatacaaccggcaattgtcccgatcttagaaacattgtatgtttcacgaacagttaattgacccgttactttttcttcgtaaactggttctaacatacccttcatagcagcttcgatttcttcgattgccttgtagatgattcggtgtaaacgaatatcaacttgttcagcatcggcttgaatcttagcttgtggtgttgggcgaacattgaacccgatgatgatggcgttacttgcagcagctaatgtgacgtcactttcgttaatcgcaccaacggcttcatgaataatattcacgcgcacgccttcgacttcaatcttccgtaaactaccagccaaggcttctgttgaaccttgtacgtcggctttgataataacgccaacttcttttaattcgccttgtttcattgtttcgaacaagttatctaatgtgacagggtttgaacggctacgttccttcaagagcgcacgtttagcacgttcttcaccagcagcacgagctgttttttcgtcttcaaagacaacgaaacgatcagctgcttgtggcacatcattcaacccagtaatttcaactggttctgatgggaagacttccttcacacgacgaccgcgatcatttgtcatgacacggacacgaccaaaggtattcccaacaacgattggatcaccaatcttcaatgtcccttgttggatcaagagtgatgcaacaggtcctttacccttatcaagacgggcttcgatcactgtcccaaccgctttttgatctgggttagccttcaattcaagcacgtcggcttcaagaagcaccatttcaagtaattcatcaatgttttcaccagtcttagctgagatcttaacaaagatggtatcgccaccccagtcttcaggaacaaggccgtaacccatcaattgttccatgacgtgatctgggtttgcgcctggtttatcaatcttattcaccgcaacgatgattggggctttagcagccttggcatggttgatggcttcgattgtttgtggcatcacaccgtcatcagcagcaacaactaagatgatgatatcagtgatatcagcaccacgcgcacgcatgttactgaaggccgcatgtccaggtgtatctaagaatgtgattaaacgatcgtttaacttcgtttggtaagcaccgatatgttgcgtaatcccaccggcttcaccatcagtcacgtgactgttacgtaagttatccaataaggttgtcttaccatgatcaacgtgacccatgattgtgacaactggtggacggctcacaaggttggcatcactcttagcttctgtttcaaatactgaatcgatatcagcaatatccacttccactttttgttctgcttcgatgccgtaatccgttgctaataattcgattgtatccttatcaagtgattggttcatgttaaccataatccctaacatgaataacttcttgataatttcagctggttcacggtgaatcttcttagcgatgtccgcaacgttcatgccttcagagtaaactaatacttctggtaatggccgttctttacgttgtggcatttccttcttagcagcattttgttcagctaattgttgcttacgggtcttcttacgtttcttattgaaacgttgttgattgttaccgtagctgttatacccgccgccacgtttcttatctggaccaaagttctttggcttgcttgctgtattgtttgatgctggtttagcagcactcaccgtattagcttgcattttttgttgcatttcttgtgccgaaactggccgactttggttcgagttgttattaggacggctgtttgtattgtttgctggacggccgttgttattgctgtttgcaggacgattatttgttgtcgttgggcgtgcgccggctggcttgttgccggctggacgactgctgttattaccgtttggtttagcagctggccgtgggcggttactttgttgacggcgtttcttttcgtctgcttcgcgttgttcacgttgttgttgaatgcgttcttgcgttctttgacgacgtgcattagcttgtgagatttgttcttgcaagctcaatggttggtttgacccagctggacgcgtattgccgtttgtccggttagccgcattattgttagggcgaccattattaggacgggcgttattgttgttaggacgaccattggcattgttgcggttttgaccatttgatgcttggccattccggttgccttgtgggcgttggttgtttgaacgaggtgctggtttgctgctagcttctggacgacgacggatagcggctttgttaatcttaatcttaccgttatctgttttttcgcttgcctttggtgcagcaggtgctgcggctggcttgctgtcagttgtcgttgcagctggttttgtttccttatggaagatggctctcaaagctttttcttgattgtcatcgatagttgccatgtgattttttagatcgtaaccttttttaacggcagtttctaaaagatctttgctggcaacgttaatttcttttgctaattcatagatacgttttttacccatatcttcacgctcctttattatcccagtagcgttatcatctttttggcaaacccggcatcaacaaccgcgatggtggctctatgtaatccaattgcttgggttagctgggccgcggtatacgcttttgtttccgggatttcgtagaaatgactcttatcagtcaatttcttctgtgtcagttggctaatgtctgagccgataaaaaccaatttcgctttttgctgctgaatggcttttaggacttgttcttcaccactgaccagttgccgtgctctcatgcaaatacctaagagttgtaataaacggtctggttgttcactcattttcgttctccaaataattctagccgagccttttgatgatcaacatattcgaataattctgtataaaatgattctgcaacgtcaatcccaaacgtcttttctaaaattttcttgctttgggcggtcttgattgcatcaggttctagtgaaacataagcgccacgacctgatttcttaccagttgggtcaatactaatctcaccttcggcagtctttacaatccgcaccatttcttttttaggcttcatttcttgcgaaataacgtcttttctcattggtacttttctttgtttcatcatgaacacctcacttattcttgtggttgttcttcagaatcaacagcagaatccgttgcttggtcttcgaagccttcaacagcttctgttgtttcttcttcaaaaccttcaacgactgcaccttcatcttgactatcgtcttcatcaacgaattcgacttcagattcaggtttgatgtcaatcttgtagcccgttagcttcgcagctaaccgtgcattttgaccttttttaccgattgccaatgacaattgataatcagggacgatgactgtacatgtatgttcgttatcaccgttaaattgaacagcgatgacttcggcaggattcaaggcattggcgatgtagtctgaaggatcttcttcccacttcacaatgtccatgttttcgccgtgtaattcattaacaactagttgaacccgttgtcccttaggcccaacacaggtgccgactgggtcgacgttggggtctgttgaacgaacagccatctttgtccgatcaccagcttcgcgagcgattgagacaatttcaacggtgccgtcataaatctctggaacttcttgttcgaataaacgtttcactaaatcagggtgtgtccgactaacaaagacttgtgggcctttagttgtattttccacttttgaaacgtaaaccttaatccgatcatgtgcttggtattcctcgtttggaatttggtcttgcttgcttaaaacagcttcgatcttgcctaagttgacatagatgaacttgttatcgcggcgttcaacgaccccttgcataatttcgttttcgtattggctgtattcattgtaaatgatacttctttcagcttcacgaacccgttgcataatcacttgtttagcagtttgggctgcaattcggccgaagtcttttggtgtgacttcaaaacgaattgtatcgcccacttcgtatgccttgttaattgccaaagcatcttggtagctcacttcaagccgtgaatcaaacacttcgtcagtgacttctttgacagcatagacgtggatgttacccttcttttgatcgaattcaacttccacgttttgtgcttgaccgtaattccgcttataagcagaaacaagtgctgcttcaagggcttcaataacaatctcttttttaacgcctttttcttgttctagcgcatcaagtgcacctaacatttccttgctcatgtaactagcctacctttactaaaattcaattgctaagcgagctttggcaatttccttacgattaaacgttacttctttttgacgcgttttaattttaatcactaaagttaaagtgtcatcatcaagggcttttagtgtaccttgatagattttctcgccatcaacagcttggtataacgagatatgaatgtattcgccaagtgctttttggaaatcggcttccttctttaaaggacgctctgcaccaggtgatgaaacatctaagaaataagcctgcggaattggatccgggtcgattgaatccagtttctcacttaacgcatcgtttactaaggcacaatcttcaaggtcaatgccatttggtttgtcaatgaagacgcgcagataccaactgctaccttctttaacaaattcaatgtccactaattcaaaatggtgttgatcaagaatcggcacgatcagatcgtgaactgtttccacaacggtactcaaatgattccctccaattcatttttatatttcagattagacgtgctccaataaaaagagtgagcatttctgctcactcgctctgaagtatctaattactgataacaatataccatatttttcatgaaaatacaaacaaccgctttaattttcagtggttgcgacgctattttgcgtcttacccgtcgtcaagatttcatggaagttttcaaaactaatttcgaccatgttcttgagagcttcatcagtattcgaaccaacgtgtggtgtcaacaagacgcgggggtataaatcaatcaattcttgagtggttgcatctggaacaggttggtctgctgggaattgcttgaagaagatttcgccttcagctggtaacacgtcagcggcgaatgcaccaagttgatcagctttcaaagcatcgataatcgcacggttatcttgcaattgaccgcgggctgtattcaccaagattgcatcgttcttcatctttgcgattaagtctgcattgatgaattggtcgttttgaccagcgaagtatggaatgtgcaagctgacaatgtcactttgggctaataattcatccaagctgacaaaatcaagcacttccttagcgatttctgatggatataagtcgtaacccacaaccttggcacctaagcctttgtataacttcgcttcggtgtagccaatcttgccagtcccgataatcccaaccgtacagttgcggacttctttactgaacatcacagggctcacacggaaatcatgatgggctgtccgattcgttgtgtaagtggtgtgacgcaacaatgacatccctagcgtcaatgccaattcagcaatcgcgtttggcgagtagactggcacgcgagcaacttccatgttgtacttgcctgctgcggccaaatcgatatgaccgtaaccgactgtccgggtaaacacgtaacgaatcccgtattcattcaacttcgctaagttttgcgcatcagcggtacagttggcacgtaacaagaccgcgtcatgccccttagccgtttcgatattgtcgtgcgtcaataagtcttcaattaacgttaaatcataatcgtagttgttatatttattgaacgtcgccacttcattcggacgaacgccgtaacaagcaattttaaacatttaatttccctcttcctagaaaatcccgatttggttaatcacttctaaaatcactaaccagactggcgtcatcacaacagctaagaccgttgatagtaatgacgcgttcgatgctaagaccgcatccttgtcaaaactaatcgcgtaagcagcggcgaccgttgccgttggcgttgccatcatgatgacaatcgttgccaaactgatatagctaactggtaaaatgtgggtcattgttaagatggccaataacaggatgtttaaagcaggtactaaaatcactttgttaatactataaatccatgatgtcttgtccgaagcagcttctttgaagctgatttcgccaagcgttgtcccaattgctaaccaagctaatggtgaacataaaccagctaagtacgtcattggtttgaacaaccatggcgctgtttgatcaattcgtaagaaggccactgaatgtccagcaaccgccacttgtggtaatgcgccttggattaaccagatgattaaccccgcaaatgtggcgatcacgattggatttaagaacatgtttttcaagttcttcgattccatcttcaagccactcatcttgatgtacccatatgagtataagaacacgcgataaccaatgttgaaaattgagctatacataacccctttagctccgaaaactgctccaacaattggaatcccgaagaacgttgttgaaccaaagatggtcaacacgcgcaatgtatcttgttgatcacccttaaagcgtaagtataacggttttgaaattaaaattaaaataatatagatcaagaagccccaaactaaaacgttgatgccttcttttaaagtcttcccattaatatcttgcatgaatgagttgaatgccaaagctggtaaagcaaccgttaaaacgacttttgacagaatcttcccaaatttatccgtgaagatctcgcgtttgcggcagtagaatcctaataaaataataaacactgtcgacgtgatcgaactcacaatatccatgttcgtaaacgtcttcgttaaaatatcgccaatcctcatctgtactctcctctgttataacatttagtccgctgtattataacacggacaactggtatcgattataacaagaaagtaacggaaaagaaatagggcaaaagaaaaagagtgaaaaataacttcactctttctcagacctaaattttgtattcattttcattacatgctatatattaattatctaaactgccaaggaggccttctcatgcccagacaaagcatcttcaacatgtctctttccaaaatctaccccatgctcgtccaaaaagccgaacgcaaaaaccgcacccaagccgaagtcaatcagattatctgctggctaaccggctactcacaaagcgaactcgacgcccaactcgctaaagacatcccctaccaaacgttcttcgaggaagcaccacagatcaatcccaattgtaatctaattaccggcgtggtttgcggcgtccgcgttgaagccattgaagacccactgatgcaaaaaattcgctggctcgataagttggtggatgaattggcgaaggggaagacgatggagaagatactacgagaataactaaagcactcataaaaataaagccttagggattagcttgaaaaactaatccctaaggctttattcattacacatctaatcttttaaaaactgttgttgaactggtttaaacaaatttctaactgtcccaaagcgaggcggataatcattagagccaccagactcaatcactgttccgtctgcataggtcgcggttactgaccattgctcaccatcaatgatagactcgttaatataatagtcagcccacttcggaagttgcaatcttgaaagtcgattacgaacccgacggatagtatctgcatccaattgaaacctaatttcttcagggtgaataaattcatgcgttaccattctgccaatcatcaaaccagtttctaaatcgagactatatacttcatgcgggccaaaataaccatgacttgcgaattcaaatttatagctccatagtttaaagcattacatatcatattacttcaaaaaagacgttaggaagttttcttcactcttcttcattgcttctttaaacgcttgataacctacagcatcatctgtttcggcccgtacctcaggaatcttcaaacctaattttgcaatcatcaccgattcacggactgatacattatcctcataggttactccttgtctcagatgcaatggcgtaacgagttcgttcgtatgattaggatagatgtaatagccttgttgagcatcaaagcgtgccatatatgcaactaactgcaaataatcctggttaccgatatttccttgtggcttatactttgcatcagcaataatacgctgttcttggacgcgactgataaaatcaggatagattaatccgcctcggtcgaataagtattgtccacccacacgacttttattcattgggtgataaaaccacggtccaatcaattgattaatatactcttcccagagccacgcacagtcaaatagaataccttgtacttgttgactgccgccaccaattcgttgtttttcaaactgcaaaatcattaaacacaaccgttgtaaacttcgatattctctataataagcatgtcgaatcggattttctttatttttagtgataatcgttcgacgatcataatcttcataatgttttgttgcaacaactattgtagctacctcatcagatatcttgcctaacacagccttcccgtacgatttatttctgataaattcaatcgtatggcgaattagcaatgttacttcattctcatatgaaaattcacgttgattataagcaatatttccaataaatgggctattttgcctaatatgacgtgccacatcaattgttccacgtatattactgtcattatattgacgccgaccataagttttaaaaaggcctttgcgtagcgctttttttaaataaagtggcaataaaaaagccaataagtcaaaccccaatctatcccgctgtgcctccgtatttaacgccatcaagttaggcatatcaaacacccgctcaattagatactgaaaaaaataattgttcgccgatctttcaaaacgagactgaataatcagcctctcatcttgataaccaataaaaccagctaaattactggtttgataatcctcattaatacttcgaagaaccatttgatcggcagtaagatcgtcggcattggcaattatttctggaaaaataaaaaggtgatcattctttagttgcgttagcgtttgattaactaatttatttgtaagtttagggatatccttatagtgttcttttaattcacgttgattatccctagtcgttttcagcatcattattcaatcctgccattttattaggattatcatacgctctcttaaagttagtcatatatttcacctcatcatagagtccacgtacatagtcctgtaacaacggttccaaataatctgaccacaattgttcgaaggaaactgttgctagttttagaaagtatgctgcaccaatttgataattttcattcaactcgtccacatcaataattgcctgatttaatgcaaacatacggttggtcgcttcggtttgcttatcccctaaagctgccaacatcccaatatgttcattagccttaacttcaataaagcggaatcgacggcgcgtcgcaaaatcaaaactatcaaccgatcgatcaatatcattcattgttccaataatataaacattctccggaatataaaacttctccatcggatcatcatgtaaattggtatattgcgtcgaaactgccccttcttcaccacgatatcccggatcaattgagaagaatagttcaccaaatattttagagatttcaccgcggttgatttcatcaataatgaaaacatagggtttaggcgccgtcagttgaacttcaacatactcttttagccccaaattatctttcatatattggacaattgcctttcgataattatcatgaccgcccttttcgacacccggtttaccttgataaatattgtaaagctgcgttttattataaaagcgactcttcccttgaatccaattaccaaccccgtactcgcctgggtaggttcttgtcgttagaccatttccttgttcattcagctcaatttgaaagtaaccacttcgagcattcggaatatttaaataaccgacctcctctaattttaaaatgagttgttcccaaactaatttaaaattatcagcaccgcctttttgagcctttcttgcgttcattacgaactctttaaatactccgttttgtaatttaaatcccatttccccatcatcagtggtaaccggacgaaggccttcaacaaaatcagtgtaatcataacttgggtgaaattgaacaaaaccaacttgttgcttctgttctaaggttaagtcagcgtatttttgaacagaaccattactaattaaactcgcagcaatgcccttagcaagatatgatttccccgttccaggggcgccccgtagaataatatttttagattctttcagtttttcctctaaattacctaacacatcattgtccccattccgtactggatagtttgtaaatgttgcataaaaatgagtaagtttctgattgggtatatctttcgaaaataaatctaaatcgtccacttggtatgcttcatttaattcagtatcgtgttgatcttgatgcacaataattcgtaacgtttcaattttctgctgtctgaaacttgcacggatattaacactcttacctactgccaaatcataattcaaatatggcaacttactatcgccttcaccgctaagtggtccatatgatcccgaattaaaaagatggatcatataatgaatattatcgatttccaactcatcaaaattaccggtatgtctaaatcgattcttttcaaaccccgatgcgcccactgtcgtactgcgtccttcttttgattgaatattcaaattcgcttgttcgacaaagcgacgtaataaccacttaaattgactcacattttcatcagtattaacgatacccggcaccttcacttcaaatttttatttatgattattttagcatagattgaaaatatgaaataatcgttttaaaaaaccgtaaaaaccttacgtttttatcgagcgtaaaagttatcgaatatcactagtttatttttctaaaaatgatatgcgaacactgcttatcaattgggaagagcgtaagttaggtgatttagctaatattgttcgtggagcaagcccaaggccaattcaagatccaaaatggtttgataaagatagtgatattggatggctcagaatttcagatgtaactgaacaggaggggagaatacgtcatcttgatcagcgtatctcaaaattgggccaggagaaaacaagagttttaattgagccacatctgctattaagtattgctgcaaccgttggaaaacctctggtgaattatgtcaaaacaggtgtacatgatggattcctaatatttttaaacccattatttgaaagagagtttatgttccagtggcttgacatgtttagacctaattggaaaaaatatgggcaaccaggtagccaagtaaacttgaactctgaactagttaggagccaagaaatacctattcctattcttgaggaacaagaaaaaattggttcattcttcaaacagatagatgacactatcgctcttcatcaacgtaagttggatttgctcaaggaacagaaaaaaggctacttgcaaaaaatgttccctaaaaatggtgcaaaagttcctgaattgcgatttgcggggtttgctgacgattgggaagagcgtaagttgggggacgtagctcccttacgtggcggttttgcgttcaaaagctctgaattcagaaacactggtgtaccaattgttagaatttcaaatattctttccagcggtgaggtaggtggagcttttgcatattatgatgaacaggataaggatgacaaatatattcttccagataaatcagcagtcttagctatgtcaggcgcaacaacaggtaaggtatctatactatctcaaacttctcatgacaaggtttatcaaaatcagcgagttggttattttcaatccgtagactgtatcgactatgactttatttccacaatcgtccgttcagaattattcatgatgcaacttgagtctgttctagtttcaggtgctcaaccaaatgtctcgtcaaaagaaattgattcgtttgactttatgattccaaaattagttcaagaacaacaaaaaatcggctcatttttcaaacagttagacaatactatcgctcttcatcagtctaaagtgggaaaactaaaagttttaaaacaagcctatctccaaaaactcttcccttaaacaaaattcgttaattcaagatattaaaacgactatttatttatactttgatagtgaccaaaattggtcactattttttataggggagtggttagttatgcggggaaaatatctttttcacgaatactttgaagaatggatggtgttatacaagcgcggcgcaattaagcaggttacttatgataaatatgaattaacgcaacggcagattaaaaatcttgcacctacgctattattgtcagacttagatcggcgagcctatcagcaattattaaacgattatgctgcgacgcatgaacatcaaacgacgatggattttcatcatcagttaaaatcggcaatctacgatgcacttgatgaaggttatttgaagaaagatccgacgcgtaaggcgattatcaaaggtgttgtccaaaggcgccataagatgaaatatcttaatcagggtgatttgcgccgactttttggtgtcttgaatctagaagacgaggttaactgggattacttcattctattactcgctaaaacagggttgcgtttcggtgaagcactaggactgacaccatcggactttgattttagaacccaacaactaacgattgataaaacatggaattacaagcattaccgcggcggctttcaatcaactaagaatcagtcgtcagttcgaaaaatttcattagactggcaaatcgcaactcaattcgcacatttaattaaagatttacccgaaaaggaaccaattttcatcgacagaacacgccgaacacataatgatacagcgaatcattatctagaacgtaaatgtaaacaagcgcatatccctgtcattagtgtgcatggtctcagacatacacacgcttcaattttgctatatgcgggtgtttcactagcatcagtggctaaaagacttggccatgccaatatgacaaccacgcaaaaaacgtatctgcatattattaaaaaactcgatagtaaagataatgacaaaataatgcagtgcttgatgacactgaactaagcaaaaaggccgcgaattttcgtggccttttttgaatttctctttaaggaaaaagtttttggagataggcttgttttaattgctgtagctgctcaattttgagttgttgaagtgaaagatcttgatctaatttttgaaagaactctccgattttttgttgctcttctaagtttttagagatgaaaaacattgtttctgatacttttttccagtctgaaggtggcattttcgttccagatgtatcatttgcagctttttggtatttattagtttgaattagattgtaaacaaagttcgaaatattattcgtggatctaaaaatccagaaatcaccaagtgctattcctttaaaatttggcattaaccaattctttaaatacggacgaagtttaccatataatatatcattaggttcaaattcaattccctttcttgtgtcaaattttttacttatatccttatttaatctgccttctccagcagaaatatcttcaaattctatcttaggcaatttattggaattagaacttttatttacgcgaattattatgttcttaaacttaatttgtccccaatcatctttaaaaccactaaatcttaattgtggaacaacttcatttttaacaggaaacatttgttgcaaatatccttgttttaactttttcagcagatcatgctttcgctgatgaagagcgatagtgtcgtctaactgtttgaaaaatgagccgattttttgttgctcttcaattctagggatacttatgatagcttctttgatatcactagaattaatactttcaaatgttgaacccgtgctatatctagtccaataaccgttagacttcattttcccaagattctgaaatataaactcattacctttgatagcagcaacacctcgaccgataaccacgtcataagctgttttgccaatatctccaaccggtgctcgaacactcaaaatgagatcgtttttttcagcttgtttagtgacttgagttgtccatactcttggaaaaacatgaccatttttcatgtcagcattaccttgaacaagaatatgatcattaggattgtcagtataattttctgaattaggagactgtcccatcactatcagaacttcgtcccccaacttacgctcttcccaatcgtcagtaaagcctttaaaccggagttctggttgctttttttgctctttcatttaatcagactcctttttcgttgatacgagctgtgcttccatttctgcaaattctttttccaattttgcaatttctaaatcgatagctgcaatttcttttttaacctcatcaatgtcgattggttcttcttcttcaaaagtgtctacataacgcggtatattaaggttaaagtcgttttctttgatttcatctacagttgcaacatgagcgtatttatcaacatctttcctactcttgtatgcagcgacaatcttatcaacatcgctatctcgcaagttattttgattcttagctttctcgaaatcactacttgcatcaatgaatagaacgtctttcacttggcggtttttcttaaaaacaagaattgtagttggaatacttgtaccataaaataagttagctggtaggccaatgacggcatctaaataatttttttcaattaacgtttgccgaatcttgccttcagccgcgcctcggaataacacaccatgtggcaagacaattgccattgtcccgtcgttgtttaaatgatagagactgtgcaatacgaatgcgaagtcagcttttgaagttggtgctagtttaccgtattcactaaaacgggggtcttttagtttcgtttcattattatcccattttgccgagtatggtgggttagcaaccactgcatcaaaactcctaggttgatcaaccccagcttcatcaggaccgtctggccaatcactttcaagtgtatcagcattgtttaaagtcatattgttaaatgacacatcgtgcatcattaaattcatgcgtgccaagttataagtcgtcgtatttaattcttgtccgtagaacttaatcgctcctgcttgagttgtttcgggtaattgattacgaactgttagcaataatgatccggagcccatggttggatcatatactgagaatgctgtattacttggtgcaacatccatcgtcactagtttagcaagaatcttgctgacttgatggggtgtatagaattcgccaccctttttcccggcactggccgcgaattgtccaattaagtattcataaatttcacctagaatatctttatcttcatcactcttatattcgatatcatcaactaatttgacaatattattcaaggatttagcacgtgccgtcgttgaactacctaagcgcgaatcaccgagattaatgtcgttaaagaccccgttgaaatcttgagcagcctcttgatttaagaccgcatttttattgaaattatcaaaaatcgtttgataatcacttggaataaccgtgctattttcaattcgttcatttaatgattgccacgtatcagctggcgcaatcgcataacctaaacttgacgaaatatcttcaagataatcagctaattcatctgccgttgcttgttcgacataagcttgattaattgtctgcccatcggcaacatcaatcacattattagaaactaaatattgttcctgatgttctgaaaggtaccgataaaacataaaggctaagatataattcttaaattcaccagcgtccatatttccccgtagttcattagccattgcccataatttcttagtgatgtcttgtaatgttgttatctcactcattagattcgttctcctttaattgcggatcttttaatgtattacatgtttatcagctgctaaataaattgcttcgcgtaatccgtttcggtacctgattttcgaaagtgcttggatatcagcatctaatgctaaattcttataactcaaacttgcttcagcaataatatctcgcaattggccagcatcatctaaatcttgttggccatattgatgcgtactaaatagttgtcgtaacccagcactcgtaatcacatctgtgatcccccactggtttcgaaattctaataaaatccgatcaatactaatttgattagcttcttgaataacttgctcactatcgtccaacttgacaggatatatcattgccatccctttaggtggatagtagccatcaaggatcgcttgtgtcgcgtttttaattttgtgcgcataattttggtcttctaagccatttgcaaattgatcaatatccttcttcgtcttctgagcagcctcaattttttcttcatgcatttcattcaagagtttttcaacgagttccgtcaagtaatcgtagttgacttgaacatctttgatgtgcgtcatctttaactcaatttgctgaacaggcactttatcccgcacactaatgtattgttttatttcattcgttaaaacagtggtcaattccttttcttgtgccggtgtcatccctaaagcacgaattaaatcgtccggcgtatcatagttaaatccactatcttcttcaccatcttgcggtgtatattgtttaagtttcgacataccgacgttgtattgtcgcaataattcaaacatctcgtctttttggcgttcacttggtggtaattgattaaaaccatccgttaaatcatccagttggccgacaatcccacgaacctcttgcaccatgtttttaaaatctttcgctaaaacaccagaatcgacgttttcctttttctgttctttttctgataaagtggctgaatccttgttggaataaatggctaatgctttattcattaatttttcattctggctcggccaccgataattaaccactcggccccaaggtttttctttcatatcagcgattcgatttgttcgagagtacgcttgaattagacctgccccttttaaagtacgatcaacatacaaggtattcatttctggcgcatcaaatccggttagtaattgatccacgacaatcactaaatctaggtagttcttgtcagttgcagttcgattaaggcgactcgtaacatcttgcgtatagccagaaacgtcatctaacccaaaacttgttccaaattgatgattataaaccttcatcgcatcatgtaaattctgattggtttcgaccatgccatctttattcgttgtattttgactaaatgtaattgcaactttcagcagttggccgccgttctttgcatgctcttcattcaccttttgaaattctttaaagtacatcatagccattggggtacttgccttaccaccaccaacatgggttgtaaataatgcattgtacttaccttcattggaacggttacgccaattcttaaaaatatcctggacaactaagcgaacatggtcctcattttcatcatagaaactaggcgcaatttcatcgtccatgtcttcttgcgataaattatcaattttatcttgaatctgacgctgttcccaatcgggatgttgttttttatagaagtctggcaaatattgtgttttcatactttccgtatcaatcgtcgtctcaaaatcaactttaaagcctagtacgtttcgatcggcaatagcttctttaatggtataagcatgcagtaattcgccaaaaatatcctcagttcgtaacccattagttgtttcatcaaacataggtgtacccgtataaccaacccatgcagattttttaaagctcttttgcaataattcaaaagcatccccgccagttgaccggtgtgcttcatcaacaataaagacaatgtgtttatcaggtgacttaaaactcttacgcttaaccagtgtttctagtttttggactgaggtaacaatgatattgttatccttgctctttaatttccggcttaagtcgttggtactctgtgtcccttgcacactgccagagcgactatcatcatccactgcaccatcaggatcatacgctttgtaattttcattcgtttgctttgttaaagcaattcggtcaacaacgaaaacaactttatcgactcccggcattcggctagcaagccatgctgttttaaaactggtgattgtcttacccgaacccgttgtatgccagatatagccaattttgtttagtcccatatcaaaatcaacttttttaagtttttgaataacgttttgtgttgcataaacttgataagggcgcatcactttaatcatttgtttgttcttagtaccatccaaaatcataaagttagttgccatttgatgagccattggaatacttagcattgaatccgcaaattcgcgccagttacggacaatcttgttatctgatttccgttgccaattaaacgcaaaatctttgttaaatttgtcagctgttgtattggccatatatttaacattattcggcgtaatcgccaccagaatctgtaatgttgaaaaaatgtcagtgtattgattttctaaaatatattgatgcatctgattaagtgcttcattaacatcatgtgaatctcgtttctcttcaatttgaataattggtaagccattgattaataatgttgtgtcaaaccgccgttcttgcttcccagttagtaatgctggccgttcaatttgattgacgacttgatagactgtattaccagcgccaatttgtttctgatcaaaaacggttaaaaacacatgccgaccatcatctaaatcaatttcaatctgagagacaccatttaacccatataaaaattgaccagcatcatacggtgtttttaaatctgaaatgattttcttcacctgattaaattccatgacacttagcggattatcgagtgtattttgattatgctgctctaaaatctgcttaaaattagcccatagttgttcagttgttctaatatcgtctcgatactgccacagcttagtcttcacaacataatcttttgctgtttcacgaatattacttttttgaaaatcatcctcagaaactgttattgtcccacttgtaatatatttaattaattctgattcgaaatttaattcgttcattcactagtcctttcgcaactgattcattgctatttttagttttaaatccgcactttgctttctaaaccagtttaatcgtatttggttgaaatacattcttccaattaatcgttgctcatctattggtggtagtttattaattctcaacgcttttagctgtgcaagtgtatatttaataaccatcgttccttgtaatgaacttacaagctgtcttttaatattgtgatcctgattcaacaagaaaactaaatagtgagtatccaaatcctgattagggattaatttaataaaattttgagtttgtagatagccaacatgcttttttccaacaacacttgcttctccagaaactaaattaaaaataatatcgccttctgataaaatcataactttatcaggggtccgaatttgacgtccctcattggacgatgtttctgactgaactaaatcagctttcaattcagattgcccataaatacaataactgggatcactttcattcattgaaacaaatagacgagattgtggagagccactcacaaattcaacaaacttactaagtttctccattaaatcctccttcaacacttatttaatatgcttagtatacgtcgaatcaaaagtttattcaacaaattttatgtaattttttaaaattgcataaaatgtgtgcaaaataaaaagccttcatacttctccgaaaatttattttcagtgaaagtatgaaggattttttacatcatatcaaacaacgataactgattttcatcaggcaggtcattcaatacgttattttctgttaggtattcgatcagtgtcttggaaactttcccacggttggataagtcttctttagataagaatggcttttcttcgcgggcggaaacgatttgtttggcgacgttaccgcccagacttgggacggcacggaatggcgcaagcaaggtgtggtcgtcttggatcaagaagtcagatgaatctgatttttcgatgtcgaccatcttgatgttaatcccgcgttccaaacattcgttggcgatttcgagaaccgtcaacaaattcttttccttggtgctggcttccatccctttatcggtgatttccttcatgcgcgctttgacgccttctttaccttgggccatggccacgaggtcgaaatcttcggcacgcacactgaagtaagcacagtaatagataattgggaagtacaccttgaagtaggcaatccgcaacgccatcaaaatataggcggtcgcatgggccttggggaacatgtacttaatttttaggcaggaatcaatgtaccagtctggcacattttcgttgtcgcgcatggcttgttgccagtcatccggaatccctttacccttacgaacccgttccatgatgttaaacgacatactatcatccataccccagtgaattaaatccatcatgatgttatcacgacaaccgataacgtcttttagggtaacaacgcctttgttaatcagttcttcggcattacccaaccacacgtcggtcccatgagaaagaccagaaatttgcaataattctgagaacgtcgtggggtgcgtttcttcgagcattccgcggacaaaccgcgtcccgaattctggtacaccgagcgtgcccattttcgaattaatctgttctggcgttaccccgagtgaatcagtgccggagaacaaggccatcacaccaggatcatcggttggaatcgtcttgggatcaatccccgataaatcttgcagcatccggatcatggtcggatcatcatggcccaggatatcgagttttaagatattatcatggatcgaatggaaatcaaaatgggttgtcttccaggctgcatcttgatcgtcagctgggaattggattggtgtgaaatcatagatgtccatgtaatccggcacaacaatgattccggccggatgttgacccgtcgttcgtttaacgcctgttgagcctttggcaagacgatcgacttctgcgccgcggaaagtttgttcggtatcacgttcgtaggctttgacatagccgtaggcagttttatcagcaaccgtcccgatcgtcccagcgcggaacacgttattttccccgaacaagactttggtgtagttatgcgcaaccggttggtaatcaccggagaagttcaaatcgatatcgggcactttatccccatggaacccaaggaaggtttcaaatggaatatcatggccatctttatcaaggggtgtcccacattcaggacagtctttgtcggctaaatcgtaacccgaaccgacttcccctttggtataaaattcggagtagtgacaatttggacagcgataatgtggcggcaatggattaacttcggtaatcccggtcatcgttgcgactaaactcgacccaacggacccccgggaaccaaccaaatacccatccttaccgctcttatacacgagcttttgcgaaatcaggtaaataaccgagaacccgttcccgatgatactctttaattctttatcgagacgtgcttgcacgatttcggggagttcatccccatataaatcgtgcgcacgattcatcgttaaggtttgaatttcatcttcggcacccgccatcttcggcgtgtacaacttatctttaaccggtgtgatttcatcaatcatatcggcgatttggttcgggttcgtcaccacgagttcttgggcaatatcggcaccaagaaaatcgaacgctgtcaacatttcatcggttgatcggaaatgaacatccggtaattgtgaccggttcaatggattagccccacccattgagtgaatcaaaatcttacgatagattgaatcttctggattcaaataatgggtatccccagttgcaaccactggtttatccaattcagcaccgagtttgaccatgttgcgaatgatttcttcaagcgcccgattatcgcgaactagttcacgttctaataatggtgcgtaaacggcttttggcattacttcgaggtaatcgtaatacttcgcgcgatcgcgtgcttcttggtagcctttttgcatcatcgcttcgaagacttcaccgctggcacaagctgaaccgactagaataccttcacgtaaggcatccaagcgactctttggcaaacgcggcgtgcgataatagtattcggtcatcgatgctgaaaccagtttaaataagttcttcaacccagcttgggtttgcgccattaaaatcgcatgcgctggccgtgcttgtttatacgcatcgccaatcccaacgcgatcattcagttgattgacgttgaccatcccatacatctcggccgcttcggcttctaatttgtataacaaataaccggttgattcagcatcggcgttagcacgatgatggtgttccaagttaattttataccgcttggttaacgtatcgagtttatgatttttgtattctggatgaagcatccgagaaacttccaacgtatcgatgacgggattttcaatctgaccgaggtcgttacgaccatagccagcattgataaagcccatatcaaacgttacgttatgcccagctaagacggcgtcgcccgcgaattctttgaacaacgctaggacttcggcttctttcttagcaccgtgcaccatttcattggtgatactcgtcaattgcgttgtgaaagctgataacgggtgaccgggatcaataaattcatcgaacgagccaatcacttcgccatctttcattttgacagcggccaattcgataatcgaatcgtaaacggccgataatccggtcgtttccacatcgaaaatcacgtattcagcatggtcgagcgcttcatcgcgcaagttatacgcgactggcgtgccatcattgactaaattgacttcgacaccgtacaaaatcttaacgccgtttttcttacccgctgcataagcatctgggaaagcttgtaagttataatgatcggtcaccgcaatcgcggattggccccatttagcggcttgttgaacaaagtcgccaatcttgttggtcgcatccatttgtgacatattggtgtgcaagtgcagttcgacgcgcttgccattttcagcggtatcttggcgtttgggatggctaacttccaccaaatcattggcgttgaccacgagatcacgcatgaagttatcttcttgaacactcccacgtaccttgaaccacatgcctttatcgatggctgcgaagatactttcgtcgccgttatcccgggagaatttcttgaccgtaaatgatgatgagtaatctgtcatcttcaaaatcaagagctggcggccagagcgtaaaacgcggacttctttatcaaagacgaacccttcaatgacaacggaacgttcttcttcattgattgtaatcatctgacgagttggttcagcaggatttaagccgcggcccattgaaatcgggccatcgactggtttaccttctgattgacgtttttctttaagtgcttcatttttcttgatcgcttcggctgccgcttgtgcgcgggctgcatcttgttcagccttctttgcttgaaaatcttcgattgccttttgtgaggcggattcgtcaatcaagggttgaatcgcaaacttgggaaaaccaagccgttgataaccagcttggattgtcgtttgcgcttgatttaagaagaacgtcttcacgatgtcgttttcgacaactaaaaagacgttgcgaccatcgatatagggggtctctttttcacacaattcgtgcaacattgaagattgaatcccactatggttgatgacgtattcccaataagctgctaaaacgccgccgtccaattcagttgcatcggtggtaatttccactgaaacgcccgcaatcgctttgaatgctgcttctaaatactgttcaaacgttgtgtaaacagcatatggcaaaacggattcgaaatgtaatttaaacgtccaccgtttggatgtttcgtggacaacgacttgttctacttggccagttttgaagccaggataattcgcaacatccgcgggtaaattaatttgttctaataatttttgaaacagtgcggtttgatctaatgccacaaaagggcctcctcatattcagaaagttaaataaaaggggctaggacaaatatcattctgtctcagccctttttagatgtccgaacatttataatgtaaacgcgctttttgaaactgcctcttgcgcttaactacaatccgcgaacgatcgacgttgtcgctcattcacgaatttaagttaatgcttggagccaaacggtttcaaacgcactctattcctaaacgtgcttttcaagctaactttctgcgcttagcgctgggaatcaaattatcgactgcgtcgttaattcgcttccctgtgctaatgctcaaaagttgaccgagcttgaacgcactctattcagcttctgttgtctctgaagccaataggatacttaatgaattaatcaattcatccttcttcacttctagggtttcacccgtcttacgtaatttaacttcgacgatttcttctgctgcttttttaccaactgtgatgcggattggtaagccgattaagtcactgtcggcaaacttaacgccagcccgttctttacgatcatcaactaagactgagtaacctgcttcttcaagtaaattttcgatctgttcagctaataagacttggtcagcatctttgacattgaccggtacgacatgcaagtcataaggggcaatcgcgcttggccaaactaagccgttttcgtcagcttgttgttccgtaatcgctgataagaggcgactcacaccgattccgtaagaacccatgataattggtttcgcacggccattttcatctaagaaagtggcaccgaattgttcagtgtaacgtgtgcctagtttgaagatatgcccaatttcaatcccctttgtaaagtgcaagttcccttgaccatcaggtgatgtttcgccttcttgaacgaaacgtaggtctgaataatcagctacggtaaagtcgcgcttgctgttgacattcgtgaaatggtgatcggcttcattcgccccaaccacggcattcaccatggcttcgacactgtaatcagcaacgatttgtaagtcttctggcgcgttaactggtccgattgaacccattggtgcgttcattgttgctaagacttgttctggggttgccatttctaagaaatcagcatctaagaagttcttcaacttcacatcattaacttcaaaatcgccacgcactaagaccaagaccggttggtcgtcagcgataaagaggacactcttgatgatttgttgtgctgggacgtctaatttagcagccacttcttcaattgtgtgggcatcgccagtcgctactttttcaagctctaattgcacatcacttgagttttgcttaggacggacactcgttgccatttcaaggttggcagcataatcactttggtctgaataaacaatcgtatcttccccaatttcagcaatcgcagaaaattccattgaatccttaccacccatggcaccggcatccccaacgattgcgcggaagtctaacccacagcgttcaaaaatgttggtgtaagcttggtacatttggcggaaagttgtatccaaatcagtttcattggctgagaatgaataagcatcttgcatgatgaattcacggccgcgtaataaaccgtaacgtggacgatcttcgtcacgatacttcgtttggatttgatataacgttaatggtaattttttgtatgatttgatttcattgcgcaccaagtcagcgaaagtttcttcgtgtgttgggcctaagatgaagtcgcggccatgacggtccttgaacttgaataagttatcgccataagtttcgtaacgacctgattcttcccacaattcagcaggtaaaatccctggcatttgcatttgaacggcgtcaatcttgctcatttcatctttgatgatggcttggatgttttccaagacgcggaatgctaaaggtaagtaactgtaaacaccagcagatacttggtgaatatagccggcccgtaacatcatccgatggctcttagcctcggccgagttaggcacttcctttaaagttgggataaataattttgactgtttcataatctgttatgcctccaaaaataatctaaaagaaaaagcgttgaatatcgttccatgtaaccaagaccattaagacgaccatgatgccgaccccgacaagggtgacaatgccttctttttccggtgagatgggtttaccgcgaatcgcttcaatcacgttgatcacgagcttaccaccatcgagggctggaattggaatcaggttcataatccccaagttgacggataagaacgctaagaagtagacgagcattgtaaagccttgactcgcgaattgcgtcgtcattgaatacatgccgactggtccggctagtttattgagtgaaaaaccacccgttaagaatgacccgagaattttaaaaatctgggtcgcattcgcccatgattgggtgaagccatatttcaacttagcccccacgctatggttgagtccagctgtcacaccaatttggccgactttccccttttgcccctcgactttcaccgctttaggtgtgatttcgagtgacttagtttgctttgcccgtttaacctggacattcactggtttattcggatattttgcaatcaccgagctgaaatcagtaaacgtcgtgacttttttgccagcaactttcactaaccggtcatccattttaagcccggctttttgtgctggcgagtttggcatcactgtgccaacaatcgctttgttttgtgggacgccaccgtttaaaaaagcaaagagcgcaaacgccacaatcgcaaggataaagttgttgaacggtcctgcaaagttggtcaacatccgattgattaaactagccgactggaattgaacatccacgggtgcgatttgcacttccgttccgtctgattcaacaatcgttgcatcgtgactgaccgaataacgctttaattcggattcgtcaccactttcatagccttcaatccataattctttttgcaagtcagtttttgcaatttgaaatgggacaccgtttaacgtggttactttgtcacttgtattaattttttgaacagtttcttgttcgtctaacagcaaggttgcttgcgtgccggcttcgatttcagattcatcatccgccatccccgccatgcggacatagccgccaagtggtaaccaacgaatcgtataagtcgtgccatttttgcgcgttgcaaataattttggccccatgccaattgaaaattcacgcaccaaaataccagaacgtttcgccatgtaaaagtggccaaattcatgcaccactactaaaatgccaaatatgataataaacgcaataatcgccgccaatagagtacgactcccttctaaatgcgtatttcaatactctcatttgatatgaactgttatattatatcacgaattccttagaaacaagaaaagcgtttagcgcaaaccaaaaagttgcgctaaacgctagataatattgacttttaaaaacgtgctttttggttgcaacaacttccgcttaatctaaaaattcaaacaatcctaaaaccgggattattcgaatttttgtattaatgctcagttgctaaccgccacaaacgcactctaaatcatgccaaacaagtgtagtagcggtaagacaaacaacatgctgtcaaagcgatctaagatgccgccgtgacctggtaagattttacctgagtctttaacgccataatagcgtttgtaagctgattcgactaaatcgcctaattgaccggcaattgagaagatcaacgttaaacctaacatgacaggcattgaataagcttgtgggaagaagtttaaataaatagctgcgaccactaatgctgataatgtcccgccaattgaaccttcccaagttttattggggctgatagctggccacattttattcttaccaaacatccgtccgaatgtgtaggcaccgatatctgtcatccagatgaccaataagatatacatcacagtgtcaaaaccaccaatatttcgcgttgcggctaaataatggaagcctaagccgatatagagactggctaaggttgtgacacccatatcatcgaagttaacccggtttttcgtgaagactgtgatggctaataaaatggcaacgaagaagtagaataaatcaaattgtgacacacctgctggtaaccagttaaaggcgcctttgggtgaggctaaacttaacaccgctagtccggcgatggttgcatcaggtgagacaataattcgtttacgcatgatgaaaacttctgataaggcaacgagtgctaaaacggctgccgcgatatcaatgtaaataccaccaaagaaaatgatggggataaagatgattaaagcaattgttgctgtaatgacacgttgtttcataattgtatttcctcctatttaagaccgccaaaacgacgattacgtttttggtaagcgccgattgagcgttcaaacactgctggggtaaagtctggccagaattcatctacgaaaacaagttcgctgtaagcaatttgccagagtaagaagttcgaaattcgctcttcgccactcgtccgaatcaataattctgggtcagtatattcccctaaaaagccagtcatcaagtaatcactaatcaacgcatcgtcgattgcatcgacctcaattgtaccatttaccgcatctttagcaatctgcttaaccgcttgttggatttcgtcacgcgacccataattgagtgcaaagttcaaaatcatccctgtgttatcagccgtatcggccatcgcattgttagccgctttttgcgtcttttctggtaattcttgaatattacccatgactttcacacggacgttttcagcaatcaattccggcatgaacgtatcaaaaaaatcgaccggtaactgcatcaagaagttcacttcgtcatttggacgcttccagttttcagttgaaaaagcgtacaacgttaagactttaacacccattcgactggccgttttggtaatcgtcttaacgttttccattcctgctttatgcccagcgattcttggcattaagcgtttcttcgcccaccgaccgttaccatccatgatgatggcaacgtggttggggatattggtgggatctagttgttgtgcgtctgtttttttatttgtaaacaccacatactcctccagtttcaataactctcatatgattgtaccaaaaatcacaggaagtgactatttaaaatcaaccgattgtcaccggcattgtacaaactgaaccgcccattctgcactttttgagttcttcccagatgatttttatccacgattaagcctttaataccaacgattcccgccacaacgtactgttgccgctatcacattgaaatttattgttaaatattagtagattcctatagttattggcatgtaacaggttaaatatgataaactaatacataccttaaacagaaaaagggagtttattatgcgaaaaaccttcgaactctttcgacttgattggcgtcgaatcttaaaaagcccgatcgctcttctattaattattgccctcattatcattccatcgctctacgcgtggtttaatatctgggcgttatgggacccttatagtaaaacgcaagacttaaaagtcgctgtttactcagccgatcaaagtgttgtcattgctgacaaaaaagtcgagattggcgccgaactaattagccaattaaagaaaaacgacaaattaggctggcaatttacttcgagcaaaaaagaattagatgacggcgtaaaaacggggaaatactacgccgggatttacgtgcccaaaaacttctcaaaggatctcgttagtttcgtcgatggcaagattcaaaagccaaagatagtctactcatctaatgataagattaacgcgattgcgcctaaaattaccagcgcgggtgcaactacgcttcagtccaccatttcagaagaattcgtctcaaccgttggtaaaacattgatgagtaccctaaacaaggccgggattgatctcgatacaaatctccccgtcattaatcgtttctcgagcctcattctcaaaacagaccaacaaattccagaaattaaccaatacgcagaacaagtgcttaatctacaaaagaaactaccggaaatggaattaaagcttgcccaagccaacgagttcgcggcctttttaccacaagcaaatgccatggcgcaaaaagtagtcggcatcaatcaatacttaccacaagttgaagcagccggtcagctcgcaacgaaagttcaggctaagattccagaaatccaaagtgctggcaaacaagttgccacactcgattctgatttcgatggcatcgccaatactttaacgaacggcattaacgaagctcaaactggtttagatgtgttaaacaaaacacaaaaagtcttaccggacttaatgacttttagccaaacggcccaaggtgtcgcgggtcaattacaatcagacttaatccctaaactccaagctgctttaccggtcattcaaaaaacggtggatcaagggttagccattaccaatcaattggcaactaacatttcaactaatttaacggccgtcaatagtttgctgagtcaactcaaagaggatcccaataatgctgaactcaagcaagcgctcaaagaagcgctccagaacttatctgatcacaccgctaccttgcaaacccatgcgactcaacttgcgacaaccctccaaaacttgcaagacagctacaatcagtcagcagtggcgaatggtcaaccggaatcacatgcacttgatacaccgattaaacatttaaatacgttggcgacccaactcggcgtttttaaaggccaagttgatgaccttctcgcccattacgatgatttatcaattgacgatttgcaaaccaagattaatggtttgattcaatacgccgaccaagtcgaagacagcgtcgctaagattcaagcggcccatatcggtgacagcgtcaaaaatatgctcgaccgcttttcaacattaattgctagcggtaatgccgtcttaacacagcttaacggcgaagttttaccgaaactccccgcactcttattcaacacacaaaagacgctccaacaagccatcgactatctgcaaaaatatgctcagcagttaccagcgttgaaacaagaaattcatgacgcgaatacattattaaatggcaatatgggcacgattatctctggattaaacaccgcttctgacgtttaccagaatgattacccactactcaaaaataaactgcaactggcaaccagtttcatcaacaatgacttaccaggcatcgaaaacgacttaacaacgacgctcaacatggccaacgagaaattcccactcgttaaaaccgccttaaatgatgcgaccaacctcatcaacaatgattggccattcttacgtagcgggatccaaaaaggcgctgaggcgattcgcaaacaacaaaagacggtcgatctcaaagatctgattaaattgcttcgccgcgatgcaactaaggaaagtaatttcttagccaaaccggttgaactgaaagaaaaacacgtctacccgattaagacctatggctcagcaagtgcgccgttctacacagccctttgtctctgggttggtgcacttcttttgagtaacatcgtcttaaccaacttcgcgttagacgacaaacaaaagaatcagtacactaagaaacagcaatttattgctcgctggctaacctacatcgtcattggtatcgcccaagccgtgattgtgacgcttggtaatattttcttattgaaggcctacatcgttgataaactaccgctaatcttattagccgtcttcctgagcatggtcttcatgacaattgtttacgttctcgccgcgatgttcgggaacgttggtaaaggaattgcgatgattgtcttggtgctttccatctctggcggtggcgggaacttcccagttgtcctctccgatcaattcttccagtttattaaccccattttaccgttcaaatacggggtcaacctcttacgcgaaccaactggtgggatttacgcaccgaacctctggcataactttatcatcctagcgctctttgcggttgttttcttcctaattggcctcttcctgaaagatcgaatcaatccattctttgaaaaactccacaaagaagcgacgaagagtaaaattattcattaacgcaaaaaaagccccgccactgttgtggcggggctttttgcatccattagggattaaccttctgtgatttctttttctttgttcttggcgatttcgtcaatcttcttcgttgcttcattcgtcaatttttgaacttgttcttctaaatcatgcatttcatcttcactaatctcgcttgctttttcagcttttttcaagctgtccattgcatcacgacgtgcatttctgatggcaactttgccgatttcagcttctttaccaacttctttagcaatttccttccgacgttcaccagttaattgtggaattactaaacggattactgagccatcgttggctggtgaaatccctaaatcagctgtataaagagctttttcgatatcttcaagcgcacccttgtcataaggggtaatcaacaagacccgtgcttctgggactgtaattgcggcgatttggttaagtggtgtcattgcaccgtaatactcaacattcacgcggttgaccaagcttgcattcgcgcgaccagcacgaatttggcctaatgttctttgtaatgaagcttctgctttttccatgcttgcttttgcttcatctaaaattggatttgccatattattctcctccttcgatcgttgtcccgatgttggcaccttcaacaacttttttgatattgtttggttcgtttaagttgaagactaccaatgggatatcattgtccattgataaagtacttgcagttgaatccatcacttgcaagcctttgttgataatatctaaatgtgttaatgtgtcgaatttaacggcacttgaatcagtgttaggatcagcagagtaaacaccatcaacgttgttcttagccatcaagatcacatctgcatcaatttcagcagctcgtaatgcagccgttgtatctgttgagaagtaagggttccctgtcccaccagcaaaaatcacaacgcggcctttttctaaatgacgaacagccttccgacggatataaggttctgcgatttgacgcatttcaattgatgtttgcacacgcgttgggacaccaatgctctctaagttatcttgtaaagctaaagcattcatgaccgttgccatcatgcccatataatcggcttgcgcacgttccatgcccatttgttcaccagtcacaccacgccagatgttcccaccgccacagacaatggcaatttgaacccctaaatcgtgaactgatttgatttcgtttgcgactactttaacaatttcagggttaattccgaaaccttggtcgccagcaagtgcttcaccactcacttttaagacgatgcgtttgtattttgtatttgacatgattgatatccctccgttgattactaggctcattttaccatatttaataagttatttgggtatgcgattctgaattatcgtaaaactgcaaaaaaaaggagcgcaaattgcgttccctttttgaagcaaaataagcttatttgatttggcccatgacttcatcaacaaagttattttcttttttctcgatcccttcaccaactgtgaaacgaacgaaacctttaacgctaccgttcttagatgcaacaaattgtgcaacagtttgatctgagtctttgatgaaagcttggtcgttcaagctgatttctgacaagaacttgttaacacggccttcaacgatcttaggaatgatgttttctggtttgccttcgttctttgtttcttcagttaatacttcacgttcgtgagccaatgtttcagcaggaacatcttcacgagaaacgtattgagggttaacagctgaaacgtgcattgcaacgtcatgagctgcttcatcgtcagcaccttctaaagtaactaatgaagcgatttggccaccattgtgtaggtatgcgccaaagtgatcgccatcatttttttcaactaattcgaaacgacggaagctgatcttttcgccgataacagcagttaagttgattactgagctagcaattgtgccttcgcccattggtaatgcttctgcagctgccatgtcagctggtttgtttttagcgattgtttcagcaatatctttcaataaagctttgaattgatcgtttgaagcaacgaagtcagtttctgagttcacttcaacgattgcagcagtgttaccatcgatggcgatgcctgctaaaccttcagcagcaatgcggtcgctcttcttagcagcctttgccatccctttttcacgtaaagcatcgattgcttgagcaacgtcgccgttactttctacaagggcttttttagcgtccatgatcccaacgccagttttcttacgtaattccattacttgagcagctttaatttcagccataattcatacctccgacaatttatattcaatataattggtttaaaaaaagctgtcccacaagtcaggcagtatttgcgaaacctctaagacagcttatttgaatctactatttagcgtcagtgttagtatcgttgtcgccttcaactgcttcaacgatttcttccattgagtctgctgatttgttttctgcagcaaatgtagcttcttcaacatcatcttcaccttgacggccttcgatgatagcatcagccattttagctgtgattaaacgaacagcgcggatagcgtcatcgtttgatgggataataacatcaatatcatcaggatctgagttagtatcaaccatagcaacgactgggatatttaatttttgtgcttccttgatagcaatgcgttctttacgaggatcaacaacgaacattacgtctgggatgcgaggcatatcttcgataccgcctaagaatttttcaagtttttcttgttgtttcttcaacaaggcaacttctttcttaggtaaacgatcgaatgtaccatcttcgtccattgctttgatttctttaagacgtttgatccgtttttggattgtgtcccagttagtcaaagtcccacctaaccaacggtggtttacaaagtattggcctgcacgtactgattcttcagcaattgcatcttgtgcttgtttcttagtaccaacgaataagaatacaccttcgttagcagcttcttctttaacgaagtcataagcatcgtcaaccatgcgaactgtcttttgcaagtcgatgatgtagataccatttctttcagtaaagataaatttcttcatttttgggttccaacgacgtgtttggtgaccgaagtgaacacccgcttctaataattgtttcattgacaatacagccatgtcaacagacctccatatggtttttttcgaccactggtttcacttttttagagaacttgtcgccaagcacctctctagaaatcaaccagtgtgaattattttttggtattgaaataccgtttaaaagtatactaaaaataacaaggcgcgtcaacaagaacttacatgccgcccaattgtttctgataacgggttgcatcttgtggttggtggctcactgaggtaacgccactcactgtttcaaccgctcgatagcccgcttttagcgcgacttgctgactcgccacgttttcgtgtgcagcaatgatactcaactggtcaagttccaattcactggccgcgtattgttcaatggcggctagtgcgcgatgcatgacacctcgtccgcggaaagcttcatctaaccaatagccaacttcacccgcacgatccaagtcgtcaatattgtgaacatcaatcgtaccaactaactggtggtcatcccaaatcgttgccatccaaagttcctggtttgccatttgttgttgcgcatattttaaaaagccaagttcatcggccactgattcgatatcgcccacccatggtaaccaagtatcgagattgacgcgattttgatccactaactgaaataacgccggcgcatccgcttccgtcacaggttgtaaatgaatgtgttgatcgacaactaacttaggttgcatattggtctctccattctaaaattgagttcttgaaatgccatgttccattaaatattgttcttttttgcggcggggttgatgtttgaacgcatactctgctttaagcgccgccgatttatcactaaacgtttcaaaatataataaccgcactggtcggcgcaattttgtgtacttcgcacctttgccagcattgtgcgtggcaacgcgtttggtaacgtcggtcgtgaaccccccataaaaactatgatcggcgcagactaatacgtaaaaataataagccttctcagtcattgtcagccatgaataacttcgtgcgcatctctggtgtatagtggctgtcttggtcataaatcgtcagttccggaagcattcgtaagcccccttttttaccatctttgaccgcttcaattaacaccatattcgcttctttgcctgctttgggataaacaaaccggacgcgtttgggttccatgcgtgcggcgcgtagttcgtcacagatttctaagaaccgttcgggacggtggactaaataccctttaccattcatctttaacaggccactcatggtttgaaccacagtgcgtaagtccgttgcaatctcatgccgcgccagtgccagatgttgattgggatttttttgactattgggttcaaccttaaaatatggtggattacaggtcacaatatcgacgctgtccttatgaatcttagtgttaacgtctttcaaatccatattgagcattgtcacctggtcggttaagtcatttaattcaattgaccgttgtgccatgtcggccaaccgttcttgaagttcaacaccgataatttgaccatttgttttgggactcatgaataatccaaccgccccattgcctgcgcacaaatcgacaatcgtcccgcgttttggtaactgggcaaagtcggctaacaacaccgcatccatcgaataggaaaagacggatgggctttgaataatctgaatatctaagcgaaataattggtcaattcgctcatctgcttttaacatcgttctaccttcaacctcatttgtatttaggcatattataacaaagagtatcattatttggtataatgagcagatactagtcacgtttgaaaggaatctaaactatgtttttctcatttgcacgttttatcgtccgcattttagcctggttattgaatggcaatttgaaggtcgaaaataaagaagccctgcccgaagggacttatgttttagttggcccgcaccggacttggtgggatccaatcttcttcgcacttgctgctagtccccgaaagttcacgttcatggctaaagaagaactctttaaaaacccaattttacgcttcatcttaacccacgcaaacgcatttcctgtgaaccgaacaaatcctggcccatcggcgattaaaacgccagtaaaagcccttcgctcaaaagaactttcgttaatcatgttccccactggtagccgctattcaagcgaacttaaaggcggcgcggtcgtaattgccaagatggcgcgggtcccactcgtaccagcagtctaccaagggccattaaaattctctgatgttttaaaacggaaaaagattacgattcgttttggtgaaccaatcccaatcgatccgaaattaaaactcaacgaagagaacttagaagttgtcaatcatcaaatgcaagccgcatttgatcaaattgaccacgaaattaaccctgattttaaatatgaactacctgataaaaaataataacaaaaaactgctagatgatatcatctagcagtttttttagcgcgttaaattcttaaccgcattcgtcaccaatagataggccgtaactaatgccactgcaatccagccaaattgtgttggaatcgcttggaaatcaacggcttgtctgagcggtgtcaataccagaatacctccaattaacaaactgattaaactccccaagtaaacacgccaatttgcgcgatccttggacggtgatgctggtgtccgtaatacataaactactagcatctgcgtcaataaaccaacgacgaaccaactcgcttagaaagccccctgttgagctgatgtttgcaggccaaatccaaaccagagaatcgcaaacgttaaaatatcaaccattgagctcaacggtcctagaataaacgcactcttcagtaagcctttagttgcccactgtgttggttggcgcaattgatcttcagcaacccaatcccaaggtaaccagagttgtgcgacatcatacagtaaattctggacaagaatttgcagtgacaacattggtaaaaatggtaaacagatgctggcaaccagcacgctcaaaacatttcctagattagaagctaacgtaatccgaatgtacttatacatattgataaagactctccgtccttcaagcaccccgtgttctaaaacattcaaatctttttccagtaggattacatcgctagcatcctttgtgaggtctgcggcattatcaactgaaatcccgacatctgcttgtttcaaagctgtcgtatcattaatgccatcgcctatgaaaccgacgacttccccttgtgcttgtaataaacggattaaacgcgctttttgaagtggagccaatttggcaaataatgcttgctcggttaatagctcactgacttgtgcatccgttaacgtctctaacatctcaccagtggtcacagctagattctgaatgcccactttttgggcaacttgctgcgtcgttaaagcactgtcacccgttaaaattttgaccgccacttgatgagcttgtagttgttgaattgccgagatagctgattgttttggtgggtccaaaaagcccaaaaagccgtcgaaaatcaaaccttgattaccaacgtggtcaattgatgccgtctctgctaagtcatcttgataagcaaccgccagcatccgcatcccttgttgtgccaaacgatcatgcactgccactaggttctgcttttgcacttcagtcaacggctcaatctgatccgctaacctgacttgggaacacgttgctagcacttcttcaaaggccccttttggcactaattgattacctgcatggtttttgagccagaccgttagccgccgccgctcgaaattaaatggaatctcgcccaatttttaatatggaaagtcatcattggtttggtcttgttcatagtaatgaataatcgcttcatccagaaggttctgccagccggattgacccttggcgttcaaatatgctaatcgcaaaacttgcacatcccgctttcctaaaatatctgcatagtacatcaatttaatatgatcttccgtcaacgtccccgttttatccgtacataaaaccgacatcgccccgagattctgaatggcctttaactgctttacgatgacctgttgttgacttaaaacgacactgcctttcgccagattactattgacgatcatcggtaacatctccggtgtcaaaccaactgccactgcaatcgcaaagaaaaacgactgttgccaatctcccttagtcacaccattaatcacaaatacaaagggcaccaaaacgagcatcatgcgaattaataaccaactgatgtgttttaaccctgcattaaattgattcggtcgcgacttaggttcagtagtcacaattgcgctaaagcaagtcgcttgacccgtggcaatcactaacgcggtagcttgcccattgacaacggtgctgcccatcagcaataaactcgccatatccgccgcattcgttacgtcagttgcttgcgctgttatgcgtttgctcacgggttttgattcacccgtcaaagaagattgattaatttgtaaatcatggctcgccagaatttttaaatcagcattcaccaaatcccccgtctgcagctgcacaatatccccaggtaccagactttgtgcggcaacttcagttggttgaccctcaattacaacccggctggtctttgccaacatcgcttgtaaagcaatgctcgcttgctcggacttgcgctcttgcacgaatcgaatgctactagacacaacaatcatgattaacataactatcgcgccatcaatatctcgactgagccaggagatgatcattaagacagctaatacgccgataaacggatcttgcacgctctgccaactagctcgcaataacgaacgctgttgccgcttttgaatcgtattttccccataggtttgtaaccgtgctgttcgttgctgccgtgataaccccttcttgtcagtttcgaaatgttctaaactcgcttttggcgttaattgattaatctgattgagtgtcattttaattgtcttagccatcgtaatccctctcattcgcagctgatccgcataaaaaaggcatcctcaaagaaaggatgcctcacaagaaaaacaagccattccaatcgttgagctttagcactatatgacgtagaactttgttcagctacattagaaaaagccttcagggcagtttctgttgactcaattggcatctctcgatgtttctgagtagcagcgtttgttcatataggagcctcacctaacggattagcgatatcaatatatttatatatctatcataccaaatcgacttcaaaatacaattaaacagacttattgaagatattcatttaaaaattgcgcaactttattacgataggttgttggatctgtagccaaggcttcaccatgagctgcccccgaaaccacccagagttgtttaggtgcatgcgccgctttgtaatttgtatacaccattttggttggtacaaatttatcttgatcgccatggatcatgaagattggcaatttcgagttagctaaactcttagcagtatcgccatcattaaagttatagccggcgcgaacccgtgccatccaattcgttgtgtaaaataacgggaatttcggcaatccaaagagatcgtttagttggtatgcgagttcgtcagcgatgctattatacccacaatcttcaatcaccgctttcacctgcttaggtaattcttcacccgcggtaaacatgacggtcgcgccacccatgctgaccccgaaaagggcaatttgactatcctgtccgttggtagcgacaatttgttgggcccacttgacgtaatccaagcgatccgtccaaccatagccaatggcatcgccttccgattcacctgctgcacggtcatccggcgcgagaacgttgtagccaagatcgtgatacatgtgaatatagcgtgccatatcctcttttttacccatatagccgtgcgcaactaaaattgttttgttcgtaggttttgttgctggcacataaattgccgccaattttaaatcatctgtggcagattgttgatgccactttgattgtttaacattttttaaccaacgttgattgtcttgatagactttcgttggcttaccaccatttaaaaatgatttttgccccggtacaaatgcgtattgatacatatacatagtggcaccaaatagtgctaccaccactaagacaacaacgctaattaacgaccatttcagccagcgtcttttcttcatgtgctaaattcctcccgatttactccgcaataataatagtcgtgtttttttgaaactgcttattcttcactgccaccattttggagttgatacatttcataataacgtcctttttgagccactaagctatcatgattaccccgttcgacaatctgcccttgatctaaaaccaagattaattcagcatcgcgaatcgtcgatagacggtgcgcgatggcaatacttgtacgtccttgacgtaaccgagcgagaccagtttgaatcatcgattccgtttccgtatcgatattagccgtcgcttcgtccaagaccaagattttaggatttgtaaccaatgttcgcgcaaacgaaattaattggcgttgtccacttgaaaattgggcgccaccttcaattacacgagcatgatattgaccagataattgttcgataaagtcatcagcttgcacgaattcagccgctgcgcgaatttgggcatctgtaatctcttgattaaataatcgaatatttgatgcgacatcaccataaaacatgaatgcatcttgtagaacaagccccatcttgcggcgcagttctgctgtctgaaaactccgaatatcatgtccgtcgattagaatctgaccttcataaaattcatagaaccgcatcatgacattaataattgaacttttcccagaaccggtatgcccaactaaggcgacagtttgtccaggttcaacaacaaatgagatgtcatgcaaaatttcatttttcccatcgtatgaaaacgaaacatgcttgaattcgacgcgaccctcagtaatttcatttgcagcatcggcattttgagctggcgcatattcttcttgatcgagaattctgaaaattcggcgaccagcgaccattccatcttgtaatgatgataaagaatccatcatattggtcatcggattaaagaagttcccaacataggttgtgaacgcataaaccaaacccgccgtgacaaagctatgcagggctgagacaccaaacaagctcaagacaacgaccaatgccagtgtatagagtaaattcacaattggtgcgagcaacaacgagttcgttcgaatcatcgcttcgcgcgtttttaaatagtccgcgttaacttgttcgaattcgtcggtcaaccgtttttcctggcggaattgttggataatcgtaatcccttcgattgattcgttgagtttcgtattcaactgactcaatttttcacgcatatgccggtaaacccgcgcactgtaactactgtaataccagataacaattaacaatattggtagaaacgctgccgttgcaagggcaatttttggtgaaattaaccacatcgcaatgaacgctgaaatgattgaaaatgaaccgactaacaaggataagaaaacattccaataatcaatcaaagtcatcgtatcattcgtgacccgcgatacaatcgagcctgctggcgtctgatcgaaataacgcatcccgagttgatggagcttctgaaataaatcgcgccggacatcttccatcgcgcgttccgaacccattccaaaaaggaaagattggaaaaattgtgtaatggctttgagaatcacgcctaaaccgtacaacgccgcaacccccattaaaacttgggtggtcgcactctgattggttaagtaacgatccataaagacttgtagtaatcgtggtaataaaatattgatggtcgctaaacctgcggcggccacaattgcgccgataaattggcgtttatagcgtttcgtataaccaaagaggcgtttcatgatgtgcaattgctctttcaatggaactttcttggaccattctgattgatattgcttggccatcttatgcacctcctaaggcttgacttaattgttgcttcaaccacatctctgcgtaccagccatctgcggcaaggagtgcttcgtgtgtcccacgttcagtgatttgaccgtcatccatgacaatgatttcatcggcgtgcatcacactactcaagcgattagcagtgataatggtggtttgatcagcccgcatcgttttcaaattcattaaaatcgcttcttcagtctttgcatcaacggctgatagcgaatcatctaagatcagaatttctggatcagtcataatcgctcgcgcaatcgcaattcgttgtttttgcccaccagataacgacacaccgcgttcaccaacgaccgtttcataaccttggacaaacgttaaaatatcatcatgcaccgcactcgaaatcgcggcatcttcaaccgccgcttgatttcggtcaaaatcagcaaaccgaatattgtcgcggacatccgttgaaaataagaaattatcttgtggcacatagccgatactatcaagtaacgcatccagcgaataatcccggatatcgtgaccatcaatttgaatctcgccttgatactgatcatattcacgcaataataatttaatcagtgtggttttacccgaaccaacttttccgacaatgcccaacgttttaccttgtggcagagtgaacgccacctgtttgagcgttggttgtttttcgccagggtacgtaaatttttgaacagcataatgaatatcgccagttgctagtgtttgaatcgcatccggtgcttcgacaatggtgctggtttctttcaaaagttgatcaacccgatcataactcgcattgccccgttccaagacgttgaacaagcgcccaatcgcaaacattggccaaacaagcgccgcgatataactaatgaacgaaatcaattgaccaatcgaaatgctgtgattcataaccaacgtcccgccataaatgattgttacaatgtacgttaacccgataatcaaactgatggcgggatcaaataaaccatcaatcatattcacacgtttattaatcgcaattgtcttcgtgacaatctcgttgaaatctttaatatcagcttcttcttggccaaacgtttttaagactttaatcccagagacactctcttgggttttatcattcaaccgtgaaaaagccgcctgtgattgcccaaacgctgtgtgtaaatgtgcacctaaccgtcgtgacgcaacggccaacaagggcattggaatcaaggccatcaacgttaagcgccagtcaacgaaaatcaccatcgcaataatcgttgtcccaccagtgatgattgaatcggcaaaggttaaaataccggcaccagccacttgttgaatcgcggttaaatcattcgtggcatgtgccatcaagtcacctgtccgatgtttttggaagaaggtcgtgtccatcttcatgaaatgccagaacaatcgactccgcaatgtccgttccagtttagccgcgccaccccaaatccgggtccgccaaccatagcgaaaaatatattgtaaaatcgctgcgcttaacaagacgccgagccacatgattaatttttgggccgttaattgtttggcatccattaaatcaaccagggtcccaatcacttttggtggcacaatttggacaatcgccacgaggactaaaaagatgacgccccataaatagcggcggtattcttgtttaaaataccaccctagttttttaaaaattcccatgttgtgctcctatcctctaaaattcgataagtcctattataacaatcttaattaagccggacaatcatttgtatttccgttcttattatgataaaaaaagagcttctaacaaacgacttgttcgttagaaacccttttaaaaccgacttgactgttttattttttgttgctacgtttttgttgtgctttcattgagctcatcatctgatttaatttcttttcagatggtttttgacccatttgcatcatcatagcctttaacatttcttcgttaattggtggattgtcttggaaatacttcttcatgtaagcacgtgcgccaaagaaaccagcgactgcgcctaataaagccccaatgacaaataataaaatgcctaatcccatatcttatgcaccccttcctaattcagttcacttaaatagtttacacataattaacctaaaaagaaagcggaattctaagattaatcgtcacgcaagcctttttcccgttggatatccttcactttttcaggagtgacttccttaccttctttgtcatacacttgtagcatctcaacttgtgagcggaaactttcgcggaaatcctttaaataggcatcgcgcagtgtttgacgttctgctgtttcagcttcagttagtccttcagcttttgctttgtgtgctaattcattaattcggtctaatcgtttttgatccattgccatcttgttgccctccaattcaaactatttgtctattttggactaaaatccgtaaaatgtcaaaaaacacgaacgcttgtttgaaatcccgctataggtatgctaacatatagctattagaacaaatgaggtgctcttatgacgagaacagaatccaagcaattagaggtcttgcgttttatccatgaccgcgttcaagataaaggttatccgccaacggttcgtgaaatttgcgaagccgttaatttatcctctacttctaccgttcatggccatttagcacgccttgagaaaaaaggctttttacaaaaagatccgactaaaccacgtgccattgaattaacagcagctggtttgacagcaattggcgcatcacagaagaagattccggttctcggtgttgttacagctggggtgcccattttagcggttgaagaagcgaccgattatttcccgattccaccaagtctacaaactgaacaagatttgttcatgttgacgattcgcggcgaaagtatgattagtgccggaattttagacggcgatgaagtgatcgttcgtaaacaagcgactgccgataacggtgacatcgtgattgcaatgactgctgaagatgaagcaacttgcaaacgattcttcaaggaacctgatcattatcggctacaaccagaaaacgatacatttgaacctattattttgaatgaagttagcatcttaggtaaggtcgttggcctataccgcgacagaatgtagctatcaaaaaaggattcgccgttatggcgaatccttttttagcatgttccttcagccaggtccttacgtttagcgactgactgacgttacattttttcttaacgtgctttctgatgcaatttcttccgtctagccacgtcccgcaaacaacccgattgcatcggttattcaccaacctaagttaatgatcagactctcccagcttagaaagacatccattaataatccattaatttgaagatatcgtagtctttaattttttcgcgaccgtttaaatcgtttagttcgattaaaaaggctgttccgacaacaatcccacctaattcttcaaccattttgatggttgcggcgattgtgccgcctgttgcgagtaaatcatctgtgaccaacactttttgaccgggtttgaccgcgtctttgtgcatgtataatgttgattcgccgtattccaagccgtaacttgctgagacggtttcgcgtggtaacttcccctttttacgggctggtgcaaaaccaacgcctaatttgtaagctactgggcagccgacgatgaatccgcgggcttcagggccaacgatcatttcgacccctttactctttgcgtattcgacgatcttgtcggttgctgctgcatatgcttcaccatcagacatcaaaggtgagatgtcacggaatgtgacaccttcttcagggaagttgggcacacttgcaacgtaatctttaaagttgattgccattttaaattcgctccttaactctttcaacagtttgctactgattgaatcctgccagccagtctttcatctccgcgaaggttgagtaaacaagctgcttttccatgtcaattttagctaatcgttgttgataactcggtgcactttctaatgcgtgcttttccggttgttccgcggccgaaatgagaccacattctattttaacaaatcctaagtcaaaaaacacctgcaacataaaaattaatagcggcaatttaatttttagataagtcgctaattcccctaaccgtgctttttcaattcctggatgttgacgtaggtaaaccaagaaagtcgcaaactgtttcttatcaggaataccatcaagatatgccgaatacttactatagaagataaagctgattttagtggcctgttgttggcgataaaaggcttcaaattcatctaaatcagttggttcatcaaccacaatcaattctgcttgctgtgcgacatcggctgctaagatggcttggctgccggctgggatataactttgtagctgtgccagatgcttctcattgaaaaagacataggtgccactagctttaaacaactgttgcgtcaaccgattactccgttgatcgattaacacttgcccactcgtttgtaaatctttcagcatcaattgcaacgtcgtattgccgcgccaagtattctcacttagttgaccaactaatttcaactgttccaccgcttgtaaatcgtcgtacaacgcaccacagttaaatgctaagactgctaactgcgcttcttgatcaaccgccgtaaatttcaaatgcttctgatccgcaccgatctgcttcacattggtgacggatggcaccgtcatttcaatcaaaggttctgggttatccgtgccataaggagctaattgactgatggcttgataaacatcgggcgtcacatcagctaatgcgagctgtaaatcaaccgccaatgtgggtttcgttgttaaatcaatctgattatcagcggcataagtattcatcgccgtttgtaaagcagccaattgatcgactggcatcgttaagccgacagccatatgatgcccaccaaagtgcgtcaacaatgtgcgttgggcatcaagcgctttaaagagatgatatgcttcaacacttcgtcccgatcccttggcttggccagttgctagatcaattgctagcactaaagttggcttaccggtttgttcaacgatatgactcgccacaatccccagcacaccttcatgccagccttcatgtgccaacactaaggtcgcactagcttggttctcaggtgtttgtgccatttcgctagctagcgcagtaatttcttgcacaagaccctggcgctttttattttgttgttccacaaattgggcctgttccaccgcttgttcttcatcgaaagtcgttaatagattaacacctaagttggcatcacctaagcgaccaatcgcattcaaacgtggcccaatcccaaatccaatcgatgtggcgtcaagcgtttcttgttcaatacccgctgactggcaaagagccactaaaccgggacgactggtattttgtaattgttgtaagcctaagctaactaaaacgcgattttcatcagtcagtgacactaaatcacagaccgtcccaatcgccactaggtccaaactctcgtaagggatttcttccaataatgccgtagcgactttaaatgccaccccaaccccacataaatcactaaagggatactgtccctctggatgacgggggtgaatgattgctgtcgcatttggcaatgtacttggtagttcatggtgatctgtgaccactacatcgacaccgtgttcttgcgcataggcgattggctctaagccactcaccccgttatcaacggtcacaatcaactgggtcccattttcaacgagttgcttatagacatctaaattgggcccgtagccatctttaaaccggttgggcacatatacttccacatcggcgcctaaactttcgagcgtctcttgcatcaaagcggtacttgtaatcccatcggcatcgtaatcgccgtagactgtaattttttcgccgcccatcacagccgcttggattcgatcgactgccgtttgcatatcatacaaagcgtatggatcatgtaattgaccgacattcggatgcataaacgcactgattgcctcaggtgttttgattcctcgttgccacaacaattgggctgcggctttcgggagtgcttcaactgccattattgcttgtaagtcttggtcagttggtgttgcttttaattgccattcatattgtgcttccacattaatccctcgctacttccaaatcattaacttacccattatagcaaagattattatatttcgtttaataatccaatcaatgcttttgtttatcagtccaaatgatatactgttaattgatacacaaggttattacatagggggaaacaaccatgacagttttagtattaggtggcgctggctacatcggctcgcacaccgttgatcaattaattcaacgcggcacggatgtcgccgttgtcgacagtctcgtcaccggccatcaagccgccattaatccacaagcgcgcttttataaacccgccataatatgtatttttctgttaatcctcaaagccaacccgttcgactacgcactctatagtatttccccgttgcttttaatgactttttggtaccagtagaaactgtcttttggatagcggtttagttctctttcttctgtttcgtcgcgatccacgtagacgaagccatagcgtttttgatagccgtttgtccaacttaataaatctgtgaagctccatgtcgtgtaaccgatgaccgaaacaccatcggtaatagcttcgtgaatggcttgaacgtgcgcctttaaaaaggcaatccggtagtcgtcgtgcacttgcccgccttctttcaaggtgtcataagcccctaaaccgttctcagtaattaagaccggcagtccataacggctctcaatacgtctgagtgcgattcgaagtccttcggggtcaatattccaatcccagtcagtttgttgcatataggggttatcagcggtcttgtagacgcctggcaacccacttgcttggctagtgccctttttaccggaagtattttgcttggtcaaaccaacgccaccttctagtgggttagtcgtaaccgtcatcgtctgatagtaattcaaccccataaaatcgggatgtgcgagtggatcggctaataaagcttggtccgcttcagtaatttcgggtgcaatcccgtttcgttcgagataagtcatcactaatttcggataacggccccaagcataaacgtccatccacaaatcagcgttaatttgttcggcattatcagccgcaatttgattttctgggtccgcattcagcgcataagttgggctgtaggcaaaactaggtccgatgcccccttgatagcctttttcatggaataatttaatcgcactagcattggcaaggtttgccatatgattagcttgataagttcgcttagcatcagtcactgctggcggatgctccgctgttaaatagccgtgagtgatgaagacattttgttcgttcaaggtaacccaatgttgcacacgatcgccgaagcgttcgaacaataagcctgcgtagttggtaaaatcttcaataatttgacgcgattcccaaccgccatattcggcttgcaacgcttgcggtaagtcccaatgataaattgtcacgattggttcaatatcattggcaattaatgtattaattaaacgatcataaaaggctaagcccgcctcattcacagcgcctttaccatttggtaagacccgtggccatgaaatcgaaaaacgataggctttgagcccagcgcgtgccattagcgccacgtcttcttcgaaacggtgatagtgatccaccgctacatcaccattcgtggctttgaacgttttgcctggaatgcggacaaattcatcccacacagaacggcccttaccatcttcttggtaggccccttcaatttgataggccgcagaagctgaaccccacaaaaaatctttaggaaatggtgctaattgatggtattccattactggtcatcctactttctctcaaagtcattgcttattgttctgcttgatatgctttttcgatttgtttcaacattttcttaaagccgcgtttacgcatgaaacccatgacaaaggccatcaacatatcattggtttgttgtaatttgccatttgctttggcattttcgcgatagatgacttcaatagactgcggtccattcgcgaaaatatcgtaacttgattgatagctcccccgggtagaagtcgtttcgtagtgatagctctgatctttaatcagttgcgtaatcttcagtgtcgcccgattcttgccaaattgcttgtcgtacgaataattaggcaactgcgcttcagttagtttatccccagtttgttgcttaatatcaaacaacactgattccagaatcttctgataaaaataactagctggcatttttaaatttaatttaatttccatcccgttcccactcttctcttcaatgtgccatttgttgcttttaactaaaaagagctcgaacaaaagtcattttgtcctagcccttttgttcattagccaaactttaatcgactggtacaccggccatcttcttgtaaacgtcaacgacttcgcctgctaaatcgcggaaagtaattgcgttcatcaagtgatcttgtgagtgaaccgtcaataatgtcacttgcatgtgatcgccacttgcttctttggttaacatatctgtttgtgaattatgggcttctgataaagcagcatccgcttctgcaagtttggcagctgctgtttcgaagtcacctttcttagcggccatgattgcttccattgagctactcttggcgttcccaccgttgataattaagcccatgattgcttctaagttctgttcttctgccatagtatggcacctcctatgatcatctcatcgtgaaccactttcgtaaccattcattaattggtctagatatttcttcgagaatgactaaccaatccattaaaaggctttcaaaaattagttcctgattgtgagagttcgccactatcgcattttacgaagcgaaagaaaacccttacttatattgtaatcgcttcctgagatttgtcaattaattactgataaccttttcacaaacggactagtccaaaaaaaagaaaccttaacaggttgttaaggtttctcgctcaatctggattagaccactagtcattatttttcttatggtagcccttattcttttgatttcgtttacgatttttcttatgttttggttttaatggtgcagctggctgttggcgaactggtactaatttggctttgcgcgcgcttgtcgtcggcgtagccttttgtacttgtccttctgttgcttcaccagtagttggtacagcagatgttgctttcgttgcagcaactggtgctactttaggcgtcactggtttttcggcttccaaatggtcaccgaccaaataacgggtcacaagatcatattcaggcgccaataacttacgcaaattccgcccatcgtgttgattgcccaacgtcaaaacagtccccgtgcgtcccatccgaccagtccgaccagcacgatgaatgtaagtgatttttgcgtttggtacatcaaaattaatcacataaggtaagtcggtgatatccaagccacggccagccacgtccgttgctagtaagagttgaatcttaccttcacggaaatctttgagcgctttttggcgttctgtttggcgaccttgccctgagagtgcggcatacgttactttttgatgttttaacgtttgtgcagcttgtaagagttgcgcggattggttaaaaatgaccaatcctctaaaattcttttgatgtgctaaatggcgtaagacgttcactttttgagcgttaccagttgggataaatgcatgcaacacttccccacccgtcttatcaatcccacgcacgtcgattgtttcgattggcacgccgaaccatgtttccaactctaataagatatcggttgatgtcgctgaaaagaagccaagttgcacatcggcaggtgattcttgcacgatatggcgggtttctgaaagcccgctatccgtcaataattcgtcagcttcgtccataataatcgcttggagtgtatggaatttcactttccgttgttcgctcaattctaataaccgaccagtcgttgccacgataatctctggtttggccttaagccgttcgatttggcgtttaacattcgccttccccgtaatcgcttggacattacagtcgattgccttggcataaggttgaatgacgtcccgtgtttggatcaccaattcctgtgaaggggccaaaattaagacttgtagcccttcgcccggcataattttttctaataacggcaatgaaaacgcgagggttttcccagaacccgtgggtgccagtcctagaattgattggtcttttttcagtggttgataaactgcctcttggatgggtgacatttctgtaaatccttgttcatcccatagtgcttgaaatagtggtgaaacgctcatgtattgcctccgtcatgttaatctgcatcaaatgttattccggccgactgtcttaattgatataaaacttggttgaccgattcacttagctgtaataattcatgataccgttttgtgtcacgattagcaatcatcgccgcgaaattttctgcctcagcaaccattggattagcaagtgattgttcccctagtgactcaatcttttgcccaccttcgctgtagcggtcaacactgccgattgtgccggcattatcgaggacaatcgtcgtttggccaccataaatttcagacgttagataggaatcaacggttttgccaaaaatcaacgtgacgttaaaggttggataacacagtgttgcgacccctttaccatccactccagttggtaacaattcagcttgataatcgactgaatcgggcacaccaaaccagctgacggcatcatagacgacatacacgccgagatcttgtaaagctcctccagaaaaatgtggtgagaaaatattcggttcttcacccgctaaaacagcgtcatagcgtgatgaatatttcatatagctcaaggtcgcgccattgatcgccggtaatgcgttgatggcttgttgtacaatcttaaagttggcctcatgaatatgacgtgctgcttcgaataagaattggtctggatgttgctttaataatgtttgcatggctgccatttcagccggattactgaaggcaggtttttccacgatgacatttttacccgctaaaattgcttgcttcgcttgttcaaagtgcagactattaggtgatgcaatgtagacggtttcaaattcattggcattcataaacccgtctaagtcagtgtaacttgtggcttctggtgcgtgatacttcgttttaaattggtcggctttatctgccgtccgtgaataaacagctgttaacttaaatgattcagattcctgggccgcatcaacaaattgtcccgtaatccagttagtcccaataatcccaagtgtttgcattataatcagctcccttatttaatactgccagtatacgggatttagatctaaaagcctatcgaaaagtttttctactgataagaattccgccactattcacttctttaaccattccttaaaaaaccagtcgtaagtccgataattaattgtccgcaaactaactatttcgtggtagaataatagtaagttggggtgtgacttatgcgattttttaaatttcaaaaaccacaagcaattttaaatcgaaccattcaccagtatcagcaaaaagttcggacgactcaagcgagtaaagtagcgactttttatgctggacactggtcttttaatgacaaccaaacccgaaaaaaacacacattagaaattacaccgaacttgttggtgcaaatcgatcataagccattgagtggtcaagtcatttccctcacggaaaacgaattggtctttctcgatcactacggctatcaattaaaaattacttgtgaaaatcaacggcccgtttcaatttacgatgaagccgaagatatggattatccaatcgaatagctattaaaaaaggcccataacgcttagcgttatgggcctttttagttattctttatttgttcaacattttttgagctttatctgggacttcgtttttggcaaccttttcccatgaaaccacacccttatttttattgacgattaatttgaggtacgcatttcgtttaagcggcgttgatttgttaccattaaaatcaacttttttggtaacaccatcttcattgtaggctgcttgttgatagttataatcgataaccgtttcccctgctgaatccttttcttccattcgtgttccgtttgaaacaatctgtgtatagtaggcttccccaccgtaataatagctatgaattccccaactaccaccgatgaaaaccaccacgattgcgattaataataaccagcctttgtgtttaatcattattttctctccgtttctatttaatagtctgccattgttgcttggtgccagtaaaaactgctaactgatagttcgtctgattatcactgtttggaatctgactagccattgtgtattgccagaacccgttcttagtcgccaatgttggctgttcccgcgtagtttgccacaatggatagtctcctttgtgtggcacataccgttttaataagctgggtgcaccaccaatgagacaattttgatgataatgttgattaatcaaggtcactagctgcgccagtgccatttgcgttttcttttgtgcgggcggttgttgtgcatagtcgttataataatccaaatagatcataattggtaaatcacccgtctggctgccaactgctttaaaaagttggtcagcttggcgttcaggcgaactatcaaaactaaaaaaatgaaagatgcccacgcgtaagccagtgccacttgctcgactgtaattggtgtcgaaattatcatccttgtaactggccccttcagttgcttttaaataaacaaactgaataccgtccttttttaacccgtcaaaatcttggtaaccatctgactgacttaattgcatccctagaatcggatattgcgtcgcgcttggtcgatccgaacggtgtttcaaccaccagatagcaccaccaagacacagagctaccgcgataatgccgataattatttgtcgccaatagcgcttttggaaactgtcttgaaaaatcggcgtcacttttcgtctcatccacggttcctccatttccagccttagtacgcttagtttactatcttcatgcattcgagacaagccacctaacaattttgttcgttactgtcacttagagttgccttttattggtaatcagatacaatgtgaacaaagggaggcggaatatgttagatgaacgcttagtggggttaacgtttactttacaggatgctaaatcaaccggcaccgttaatttttttggcatcttatatcattaccgtgtcgaaggaccagctagcgctggcttactcgtcatggtaacggccgtcacacctttagctttaatcgtgacagcgcaccacaatattctggcgtattaagccagacaaaagggagtttttattatgggtattttcatcagtattttagtcattcttgttttagttattgttgcagtcaccctcttttcatcatttgccttgattcataccggggaagttgggattttggaacgcttaggggtctacgttaaaacgcttgatcctggtttccatttggtcattccattcatttatcacatcacagaaatcgttaatatgaaacaaatccccttaaaagtcgctgaacaagaagtcattaccaaagacaacgtggttgttatgatttcggaaacgattaaatatcacatcactgacgtcaatgcgtacgtttataaaaataaagattccgttctaagtatggtccaagacacccgtgcacaattacgtgggattattgggaacatggacttgaacgatgttttaaatggcaccgaaaaaattaaccaaaccctttttgaacaacttagcgaagtaacagccggctacggcttaaacgttgatcgggtcaatatcgattcaattcaagtggcccacgacatccaagaatcaatgaataaattgctccgtgcttcgcgtgaaaaagaagccaacattatggaagccgaagggctcaaagccgccgcaattcgtaaagctgaaggattaaaagaagcgaatattctagaagccgaagccaataaacaaacacaaattttggaagctgaagggaaagctcaaagtgaacgaacaattgccgaagctgttaaagatcaaattaatttgatcaatgccagcttagtcaataacggcgaactctatcttcaatataagaatattgaagcgatggaacacatcgcagacggtcaaaataacaccattgtcttgccaaataagtcaatcgatagcttgggtaatttgccagcaattggtgctctggttcaaaaagaaagtaccaagcattctaattaatgaatgccaataaaaaaggccccagaataacaaccttactgttattctggggctttttttattggtcctctgaaggtgttgaatccttaggtgttggttgtgtattgcgggtgttctttttgctgagaatgtattgttctaacaaggccacaatctgttgattctgtggtagatcagagtgttgtgcttggtcacctgtcaccgtaatttcggtgtagtgcttgacttgcccttgataaatgtacttccccgcctctacactacgcgcgggtacaatcccatcattttcaaagttttccgttcccgcaattgaatacatcgataagttcgtcggaatatttttacgtttcttaatgaaatccgtcagcatctgtgacttatgcgtaatcgatgtttcggaaaagttatacggcgaaccaatcgtcatcaacttcttcactgtaatatcatcgcgattaaaataatcttctaaaaaagctgtataaattaagccgccattagaatggccaaccgctttaaagttattaaattgatacttcttagtcaacgcggtaaatgcgagcgaaaaccatttagcttgcttttgaatattactataaccgtccttattgttttcaaaaccaaccacgataaacggttcattatcccgcggtttaatttcccctgaatagctaatctgattattttcatgcacagttagttttaacaagctgtgccgattcccgcggttagcgttcaatttagccactaattcatcaaaccgattttgggttgcactactccctggaataaaaattaccggtgacattcgtgaatcatggcgcttagctaaggtcatcacgctctggcgactccattgagcagctggccacattaatccgccgatcaaggccaaactaatgactaacaaccagaggcttttttttcttaatttggccaatttatgccgcctcctttacgagtgctaattgatctgccaattggacaaacggcttgtagatcatcacgccgacgacaacgtttaataccgtcaccgccagcgcgactaaatcaccgttggtgcccatgaacgcttgcaataagccgggggtcccaagtggaaccgtgaagactaccgacggcatgagattcaatgcaactgctgccgatgcaatccccatgtttaccagtggtaccaataagaatggaatcacatacaagccatttccaatgacaggcattcccacaaggaccgcgctattaaagttaaataaaacgggcaacaacgaccatcgaccaatcaaatgataatccctttgtttgctgaagatgaaaacggcaatcactaaggctaatgtcccacccgtcccgccaatcgcaccaaagggttcatacaaagtccctaacgtgaacggatatggaacgtgccaagccgtgtgatgactaaacgcatagtttaagttggccgaagatgcgattccctcacgcccaaattgggccaatgttggcatactcgttaatccaaaaaaagttaagctagtggccgctaaaccagtccccaacgtgaaaagcagacccgtttgatttgcttttagtgattgtaatcgtaagatgacttgatctggcaagattgaaatcgccaaccaatttagcaggatactcagccctaaaatgacgccgagcaccaataaaatcgcccacatagaatccaatgaacgtcctaccgctgacccattcagcggtaaatcgcgccgatgaggtcgtcctaattttttgaaggctaatccagtcagatagccgactaataggccaaaaaataagccccccattcccaacatctggctgttgaaagataagccctcatttggcgtcaaccgtaacgctaagattaaataggcaataagccccgtaatgctggctaattgttcatcacgcttatagtgcttggctgtatagcgcgccgcacacatcgctgctaatgccgcaacgattcctaacgtcaaactcgtaatgctgtcaaacatcatctgaaagatattccgtttactcaaccaattcgaaagatgaaatacattcacaacaaaactattccggttaaaaagtgctagttggatgagttggctgatactcccaatcaagacaaatggaaataacaacattaaacttcgctgcataatctgatagaccgccgcggattggaatcgattaaaatgttgcgctaagcgcatcattatagattgttttttgacattcatgcgttaaccctctaaacatgttttgataatttcattctagccgaccttccgcttaaatgcacgtctgaacgcaaaaaacgggtcgctactttccatctctggataataacgacccgctaaaacgtgctttttgtggcaacttcttccgtctagctacgtctgtcaaatcaccaacttgttggttattcgccagcctaggctatactcagaagttaaccgccacaaacgcactctattttgaaacgtgctttttgtggcaacttcttccgtctagctacgtctgtcaaatcaccaacttgttggttattcgccagcctaggctatactcagaagttaaccgccacaaacgcactttattttaatactaatttagtgacactttcgacgtgtagcgtttgtgggaacatgtcgactggttgtgtgctttctgcttggtagccttgggctgccaatagttctaaatcacgcgccaatgttgctggattacagctgacatagaccatcttggctggttttaattgaccaacggcttcaatgaagctagtttccaaccctttacgtggtgggtcaacaatcaaagcatcgacttttaagtcatctgcttgccattgcgccatcacttcttcggctttaccgagtgtaaattcaacgttttcgatgccgttaatcttggcattgtgccgcgcatccataacagctgattcaacaacttcaacaccgtaaacttgcttagcatgtttagcgactgctaatgaaatcgtcccaatccctgaataagcatcaatgactgtttcgttccccgttaattcagcagcttcgatcgccttgttatacaagacttccgtttgcactgggttcacttggtagaatgattgcgctgaaatttcgaacttcaagcccattaattcatcacgaataaagtcgcggccagcgattaattttgtttcgtcaccaaagatgacgttcgtttgagcagcattgacgttttgcatgatgctgaccacttctggtaaagcttttttgatttcaacggcgatttcacgggcagccggtaatttcttactccgcgtgatgaagacaatcatcatttcgtggctgtaataaccgcggcgaaccataatggtcttcaaaacacccttatgcgtatcttcgttgtatggatcaatgtagaaacgacgcaagatatcacgaatgaccttgatagcttcatcaatcttaggatcttgaatgtagaagtcttccattggcatcacttgatgactgtgtttccggtagaaaccagttgttaaagcaccatcgataaaccgaacaggaacttgcgccttgttccggtaacctgttggatcatccatccctaaaacaggttgcactggaatatctaaatgggctttttggaagacgttcaagacttggttacgcttgaaatctaattgggctgggtatgccaagtgttgtaatggcgcaatcccagtttgtgagtaaatgttagcttttgattcaacgcggtctgggcttttcttcaataaattaactaagcgcgcaaaaccatattgtttattgacctttgtgacttggatttctgcttgttcatcgggcaaaacgccttcgataaacaacggatagttgtcgactttagcgacacccatgccttcataggttaaatccataatatcaaccgtcaatgtttcattttttcttacaggtgcttgtattttcatagttacctctttttaattgtgtaaaaagagtctgagacaaaactgagttttgcttcggactcttttcttagctacaagtgtgcggtcaatccgcccacgttatccaatgttccagtttaacctattttaccatcgccgtctatgtcttcttcagaaattgcttcgacttcctttacgaataaatcttcggcagactgctgagtaggggtttctgatgtaatagcgtgatctggaatatcttccttattcacatacatctcgatatgttgttgcaagttagtaaaggtcattggtgcatcgccaccgtattcgccatctaaattaatcatcatcttaacgtcatcatcaccaggacgcgcaactagttttgacgtcttggtataaatgacccgtggatcattaacgtgtttgccacctttaatgacgagtgcgattaaatggactaattcggccatgttggctgtcttaaccacaatcaatgagaaattaccatcattcagttgtgcatccggcgcaatctgttcaaatccaccaactgaattggttaaaccgagtaagaatagggaagcttccccatcatacgtaccttcatcatattccagatgcatcttaatcggtttaatttggggtaacatctcagcaccttttacgacatacgcgagatagccaaaaattgacttaaagtctgaggggacttcataggtcaattcggttagcaaaccaccaccagcaatgttcatgaagtaattgtcattggcttgaccgatatccatcttaagcgtttggttcttcaaaatcacgcgggctgcttcaaccggattatcacgcggaatcttcaaagcccgagcataatcgtttgttgtcccagcaggaatcacggccatcattgggcgtttttccaagccggcaatgccgttgacgacttcattaattgtcccatcaccgccagcggcaacgattaaatcgaagttcgcctttgctgctcttgtggcctctttttgcgctgaagcttcttcaggcgttgtttgaaaagcactcgcttcataacccgcttgttccaaaatatccagaatatcagcgacactacgtttcatcacttcatgtcctgaagttggattataaattaaccgtgcacgtttttgcattcgaatctcctaaaatatcaattatcgtttgttcaattcggccatcaacaagtcattgacaactttcggattagcttgaccccgtgtttccttcataatcttaccgactaagaacccaactgcgcggtctttaccgttcttgaaatcgtcaattgattgttggttgtcatctaaaatacctgtgatgattggtgtcaacttagcagggtctgataattggaccatgcctttagcttcaacccaggcttttggatccgtgtcattttggataatttcttggaagactttcttagcaatcttcgatgaaataatcccgtctttaatcaaattgatcatttgggctaagtgggcaggtgtgagggctgtctcttgaaggtcaatttgtttgtcgttcaagtaagcattcacttcacccatcaaccagttagaaacttgttttggtgcggcgccatcagcaacagctgcttcaaagaagtcagacatttccttggtgttcgtcaagacacccgcatcgtattcaggcaagcccaattcatccacatagcgtgcacgccgtttagccggcatttcaggcatattgtcttgaacttcttgtaaccaatcatcaccaatgtgtaatggtggtagatctggttctgggaaataacgatagtcatccgcaccggtcttaacccgcatgaggaatgtttcgcctgttttttcgtcaaaacgacgggtttcagggcgcactgtttcgccagcaatcaaaagttgtgattgacgcttgatttcataagctaaccccaaacggacgtgattaaaggagttcaagttcttcaattctgatttcacaccatattgcttcgcaccgattggtcgcacagaaatgttagtatctacccgcattgaaccttcttccatcttaacgtcagatgcgccagtaaattgaacaatttggcgtaacgtttcaaggtaagcataggcttcttcaggcgttgacatatcaggttttgaaacaatttcaatcaaggcagtcccttgacggtttaaatcgacatatgaatagccgtcagagccatgggtattcttcccggcatcttcttcaacgtgcaattcggcaatcccgatttgctttgtatggccatcgacttcgacttcgatatagccatctttaccaaggggttgttcgtattgtgtgatttggtaagcttttggattatctggatagaagtaattcttccggtcgaaatgcgtatcgcgcgcaatatcagcgtgcaaggcagtcgcaaccatcatcccaagtgtgtatgcccctttattcaaggttggcaatgtcccaggataaccccagtcaatcacattcgtgttagtattcggttctgcaccatagtttacaggagatggactgtacatttttgaattggtttttaattcaatatgcacttcaagtccgattgttgtttcgaaattcattaggcttttcctcctttgaagcttggaacgttcttgttaaattgagttgcttgttcaaaggcataacctgcgcgataaacagattcttcatcaaatgctttcccaataatttgtaaaccaactggcatgccatctactaagccggcaggcactgacattgctggtaagccagccatgttagcaggaattgttaagatatcgttcatatacattgtcactggatctgatactttgcgacccaagtcaaaagcggtggttggtgttgttggtccaaccactaagtcgtagtctgcgaaaactttttcaaagtcgcgcacgattaatgtccgcacttgaccagccttcttgaagtaagcatcgtaaaagcctgatgaaagggcaaacgtccctaacataatccgccgtttcacttcatcaccgaaaccttcagaacgtgatttaacatacacatcttcaagtgtcttggcttcaggtgaacgataaccataacgaatcccgtcaaaacgtgacaagttagatgaagcttcacttgaagccataatgtagtaagtttggacggcatacttagaatttggcaagctgacttcgtcaacggttgcccctaatgatttcaaagtttcaatggctgtttcgatttgggctttaacgcctggttcgacaccttctgccatgtattctttggcaacagcaatcttcatacctttgatgtcaccatttaaagcggcacggaaatcaggcactgggatatcagcactcgtactatctttttcatcatgaccactgatggcttgtaaaacagtcgcattatcagcaactgtccgactaaagaccccaacttgatcaagacttgaagcaaaagcgatcgcaccccagcgtgacacacggccgtatgttggtttgatgccgacaatcccattaaatgcagctggttggcgaattgagccacccgtatctgtccctaaagaagcaacgacttcaccggccgcaactgctgctgcagaaccacctgatgaaccaccaggtactttgtctaagttccaagggttctttgtcttcttgaaggctgatgtttctgttgatgaacccattgcgaattcatccatgttgtttttaccgatcacaattgcatctttagcttttaatttttcaacaaccgttgcatcaaaaaccggcgtgaaattttcaagcatcttgctggcagcagtagttgttaagccatctgttaataagttatctttaatcccgattggcatcccagctaataagttatctgcatcaattggttgggcgtccactttggcagccgcagcttgtgcaccagcttcatcgattgctaaaaaagcatcaacttgtggttctctcttgtcaatttcagcaactgtttcagttaccaattggctagcagttaagtcaccagccactaatttggcatggatactttgtaaatcttcatataagtagttcacggctagtcttcctccttatccataatggcagggactttcaataagccgtccgctgaatctggtgcattcttcattaaaatctcgcgatctgtgccagcttgagccacatcttcgcggacaatattttgaaggttattcacgtgggtcgtcactgggacacccgttgtatcaactttatttaattcatcagtcattttcatgatgtctgcaagttgttcagtaaattgttctaactcagcatcgctaaaagctagttttgaaagttctgcgacatgctgaacttgtgttttatcaatcatgagtaaacccctcttctaattctgtcacttttatccattctgattaattttaccatatattaacgtataagaaagtgacatcccttgaaatttaccagtttttcctaatctttaccggtttcagcagatattgaaatatatttttactttctttttaaaagcgtaattgaatgttatgcaattcattagaaggcgatatgatttataagagtttataatataaacgcattcgtttaatcttatatactgaatacagataagaagttgtgaataatgtacaagactatcattaacttatagatgagtgttataatatgaaaatcaatatctcggaacaccttgtagcagtagtagttttaagtttaatgggtggcattgtcttacaaagtacgaccgtttcagcagcgaccacttcggttggtgtaactatcactggtgtaacacctggaatggccgctaaagccaaagaagcagccgcagaacaagccgctttagaagaagcatggttacaaacagaaatcgatgacagcgaacctgtagaagttaccgaaacaattggcggtcaaacaactcactactgggaatcagcagatggctcacgaagcacaactgcccccgcagaagttcaagacgaaacagtagccgcaccggaagtagcacctgaacaatttgaagaaacagcagttgaagaagaccaaccagccgaaaacttcaaaccaatgcctaagaaacatgacatcgatcaaaaagcaattgctttcaaacaactcacaacagattgggctagcaatcaaatcatgtcatcattggaagacttaatcactaaggctttccaacttaacaaataacactcagtattagctaagcggcaagtatcgtaaccaagcgtccccagttttgagtagtttcaaaagcaacactcaatagtctgtcggtgtaacttacggatttacccatactagaagttactaaactatttagaattgtttttttcctattttaaacgtttataaccactccactgctaaaataatttcattaaagtttgatgagttcacccaaaattttgggtgaatttttttattgcttaatgatttttcaaaaataagtctaattttaatagacatttcacaacttatttcatgctcataaaagaacccaaacctactgatagaagcaacttaattgattatcgggctgtattatcggtatccagtctgaactcccttcatgtaattttcatttacggcagactctggctagcctgattacagcagaacacctcaataggtgttatactcttaataacatctttttaaaaggagtctatcatgaaaaaatcagtccgtttaagcaatgccgtccacctgatgaccctgattgctttaaacccgtttgataacctttctagtcagcgcattgctaaaagcatcaatactaacccctcttttattcgccaaatcatggggcaacttaagacagctggcctattgacgagcgttaagggccatgccgaacccaaactaacgaaagctcctgaccaaatttcgctctgtgatatctataaagccgtcgatgatacccggttattgaacatcgatacccaaattgatcctagttgcggccccggacaaaatattcaattatcgcttgctacctattacgatcaaatccaagaaactgctgaacagcaaatgcaagccatcaaactagccgacattatcgaacaatatcaacaacgtctcgttgaaaatccagaattaaaactttacgaaaactaacacacaaaaaggttgggtaaattgcccaacctttttgtgtgttaatcctcagcggatacccggctgatgccgcactcttttcttttaaacgtgctctatcagccaaccgcttccggttaaccctgaatggcaaacaatcgctaacccggttattcaccattctgtgttaatcctcagcggatatccggctgatgccgcactcttttagatttgctagtacctttactaagtcatacttaactgcaataccgcggtccattaattcacgtggcacaatcgcatctttgggattaacggtgatatatgttgcttgtggattttggtacgttagattcataaacggttccttaataaacatcggtgtcatcatacccacacctagttctaaatagaccgtttttttaccttcagctttttgaataaattgacgatactttgcgtattgattgttgtagtgctgaccttcaaggaattcataaccacggacccattccaacatttcagcaccacatttagggcaccgcggaattaagttttcgggtaaatggccattttcaatttgcggaaataattggtcaacaactgtctgattaggatagacttgatcatgacatttatcggcacattgaaaataggaccagtcaccctgaatcgtggcgacatctttatctggaaaagctttcgagaattgcacgtcttgattcgtcgttatcaaatcatagtctttaccctttaaaatggctttcaagtcctgatacggttggtaaactggttcatgtaaaacaaaatgaattaaagacagcttaaagccccataaatcgccgggattataccaatcgggaccagccgcagccgacatgccggctgcggctcccacgatgacgtaatctgcctctttgagcgtcgttgccattttttgtagtgttgcttgatagtctaaattagtcatttttgaggagctccttaaaattatcatcgattgatccagcaagaccgattgaccgttgttcaatggctgcgggaatattgatttcgtgcggtaaattcaacgtgatgtaacggtaacttagactttgcgccaccaattgcatgaggagcgccttaattaactgattattagcaccaattcctaattccagaatcaccacgttttgtgaacgatacttttgaacaaatgcgttaaacttagcttgttgcttttgaatcatcggcattggattttgattgttaccaaaattaccttccacttcaaaaatccgttcttcgtcaaatccactcagttgaaaatgcatgttgccatttgatgtgacaacaaagtattcatgaccgcccaccaactgctttaaatcgcgaaagacaggtgtactttcatagtgatcaaccatataatcgaacaatactttgtaaaatgcatctctttcagccactgttggatagttgtaaaaagccccttgaagaatattcataatcccgtagcgttcataaaaagtcccaaagtgggtcataaacgcttcgtcgtgtgcaaaaatattgtaaccttccgtaattgatagcccattaccagcactaataatgacggcatccgcattgtctagccaattccgtgctgttttaaactcgttcatgctgctctcctttggtgtaataaataaaataacaacaatatcgcatattgtacactgttatttttaaaattacaaccactgacttttaaaggtccaaaaaaatagcgtcgacaactgcgttagttgtcgacgctatttttttgcctatcagtcataactgactgttgtcgcactctttaattaataactcccgaatacgtgggttgagaaccttttactgccggctgctcggcctacgtaagcttgcatcccctctgcagacgagattgaaatatctaatggaatattttgtggtaaatatttatcagcagcggttgcaatgtattgtgtgaaactcatgatttctgtttcactgtagaattgtgtattaacggtgatgttcatcccagccaatacaccatcttcatagtgtgcttgagccgtgacaccactcaagttcgggaagaaggtttggacttgttctttaaaactagtaaacgcgtccgcatcactttgattgaccgctttttcatcattaacgagtgggaaaacttggttggcttggttcattttgtgccatgaatcaatcgttgtactaccgtttttgctgaccccataagcgaagaaggttccgcccactaaactatccttaggtgcttgtttgtaaagccccaccacgatggttgtcttactcaaaccttttttctgccgtaaacgcgttaagaccttattggccatttgtttaccttgttgcgccatcatggcactagaaattttggtttcaaaagtagcaccatattgttccttggtatagtaatccacttgattcatcccaagaccaatactcatcccttcaagcgcaccatctgcccctaagaagtcttgttctaagatttgttggagatacagtggattccgcttatccggttctttttcaccattatcttctggatttaagccaagtgtattatcttttgattgacgtgccaaccatttttgcgcttccgccgttttgatggtttgaccttcttggtagaggtatttatcagtagggaattgttttttagaaatgtttaataagccactttccaaactcttcacatcaaatgccgtgttactttgttgtgtggttaatccacgtgtctgacttgtcttgtattggttattatcaataaccccttcatacatgctgtcagtcactttcccggtcgtttgtagctttttagtcgacttagttgatgatgacgaactcgaattgctttgtaaacttgtacaacctgccaacaataaaaccgttgcggctgcaactacccataatttatactttgccactgaaaatggcctccttataagtcctaattgattcgcttattgcgccaaataactatctaggtctgcttcgttgataattggaatctccaatgcttgcgccttggttaatttactgccggcatcttctccagcaatcaaaatatctgtttttttcgaaactgagccggtcactttagcgccgttatcttcaagttgttgtttcaactcaccgcgggtatattgcgatagtttaccggtcaagacaaccgtttttccgttaaagtaactatcactattttcagcttgtgcctttgtcaccccagtataggtcaggttgacttgcacttcagccaattcacgaattaaagtttgtacttgatcatcagcaaaataagtcgctaagctatccgcaatcgtctcgccaatcgtatcaaccgacataatttcttcttgatcactggccatcaaagcctccatcgtcaagaaatgttccgctaataaacgggctgctttggcaccaacatggcgaatccctaatccaaataataacctttctagcgaattctggcgactagcttcaattgcatttaacaaattattaatagatttttctttaaacttatccagttgcgcaagttgatcggccgttaagcggtataaatcggcaacatcatggaccaatccttgatccaataattgggcaataatccgtggacctaagccgtcaatattcatcgcatttctggaagcaaaatgcgttaactgttccttcacttgtgccggacacattgggttaatacaccgcaatgcaacttcttcatccaaatgaaccaattcatgaccacacgaaggacattctgtcggaatcacatacggttgactgtcagccggccgtttagccagtactacttgtgaaatttctggaatgatgtcgcccgctttgtgtaataaaaccgtgtccaacaaacggacatctttatcacgtaacatatcagcgttatgcaatgaggcgcgcgcgactgttgtaccagccaactggacaggatccatcacagcggttggcgtgacaacccctgtccgaccaattgtccattcgatgtcacgaacaatggttgccgcttcttcaggcgggaatttataagcaatctcccaccgtggcactttaaccgtattaccgagttggcgttgtaaagctaagtcgttaacttttaacacaaccccatcgatgccgtattctaagtcatcccgcgttgcttgatagcgctcgataaaggtctttatctctgtcatattatgacaaacttcagcggttggattgacgttaaagccgagttctgcaagcacttcaagcgcttcgtgctgggttgtcgcttgcacatcgtcaaaggtgacaatcgtgtacataaaggcactcaaattccgctcagccgctattttggcatctaattgccgtaaactaccagcagccgcattccgcgggtttgcaaatggcggttggccttctgcttcccgtttttcatttaatgccgcaaaagaggctttgggcatgtaacattcaccacggacctcaatagagactggcttggttaatgtttgcggaatcgccttgatggtcttaagattctgggtaatgtcctccccaatcgtcccattgcctcgcgtcgcaccacggacaaattgccctttttcatagatcaagtcaatcgcgagtccatcaatttttaattcgacattatattcgatggcatgctcaacgtttttttgaagtcgattatcaaaagtcgcgagttcttcctcagaaaaaacatcgcccattgataacatcggtacttcatgcgtcactttcttaaagccaggcagaacttgatcaccgactttttgagtgggcgagtcattagtaacaatgattggaaaggccgcttctaacgtttctaagtcgcgatacaattcatcgtacacgtgatcttcaaccactggggcgtcctttgtgtaataggcttcgctgtattcagctaatgtctggcggagttcttgggccgccgctgccgcttcagtttgcgtatattgatcgattggtttagctaatcccataatgaagactcctcactgtttatgatttgaaacgtgctttttaaagctgactcttgtgcttagcttcgtattgcaaacgaccgactttgtcggtcattcacaacactgtgctaatgctcagagtcaaatccgctttaaacacactctgttttgaaacgtgctttttggttgcaacaacttccgcttagcgctactcgtcaaacaactgcttgcagcagttattcgccgagttgtgctaatcctcagaagataatcgtcggaaacgcactctattctactttttcaattggtgcgaagcttgctagtagtcttttaacgccttgttctttgaaggcgatatctagttcttggtcgttgccggtcccgttgaccttgacaactgtgccaatgccccacttcttgtgttggactttttggccggctgtccaagcaccactgttatcgccgccagttgtgtcggcaatcttgtgactcgtcgttgttttatttgcattatacgttgtagccgttgcgcgtgcataacgattgctcttaccaaatggcacattgcgttctggaatactgccagcattgccatttgcgtaatccaataatttatcatcgatttcgccgacaaatcgggacgcttggttactttgttgacggccgtataacatccgtgaataagcgttggttaagtacaatttgctttcagcacgggtaatcccaacatatgccaaacggcgttcttcttccagttcgtcttcttctaataaagcacgtgatagtgggaagatgccttcttccatccccatcaagaaaacaactgggaattcaagtcctttagcagcatgcaaggtcatcatggtcacttcactggcttcttcttcgactgaatctaaatcagagaccaatgataattcggccaagaagtccacaaataaatcactgtcatcttcttctggttcataatgttcgtcgaattgtttggtaactgagagtaattcttcaatattttctaaacgactttgcgcttcgagggtgttttcaacttcgagcgcttttttgtagccagtcttatccaataattgttccgttaattccgtcacgtttaaaaattcgcgcatcttcgctaagtcaccaatgacgttgccaaaatcgatcaacgtcttgcgactcttacctggaatggttgagagttccgcattttgcgctgcttcaagtaatgaccattgatgatcatccgcgaattgcgttaatttttcgagagtgccggggccaattccccgtttcggactgttaacaacccgttcaaaactcattgaatcagacgcattcacgactaggcgtaagtaagccaagatatccttgatttctttacgatcgtagaacttatgcccgccgaccatcttgtatggcatgttggctttgacaaacgcttcttcaattgaccgtgattgggcatttgtccggtataaaacggcaaagtcgccgaatttacgttggttcttttgcatttcttcttggatcttcgtaatgacaaagagtgcttcgtcacgttcactttgaccccgataataagtaattggttggccttcgttattttcagtccacaattccttaggtttacgatattgattattgttaatcacaccgttggctgcttctagaatcgttttggttgaacggtaattttgttccaacatcactgatttagcatctggataatcatgttcgaagttcatgatgttgtccatgttagcgccccgccaaccataaatactctgatcggcatccccaacaacacagagattcttgtatttctcagctaacatgttaaccaatgtgtattgcgcttcattggtatcttggtattcatcaacgtggatgtattggaatttttcttgatagtgttcaagcgttggtttgttttctttaaataagcggatcgtttgcatgattaaatcatcgaaatcgagcgcttgattttgttggagtcgtttttgatattcggtgtagcattgggccacaattttttcgaatggtccgtttgctagacccgcatagtcgcttggtgtttggagttcatttttggcgttactaatcgtgcctaaaatcgcctttggttcaaacttcttcgtgtcgatgtttaaatcccgacaaacatggcgcattaacgtcaattgttcagaaggatccgcgattgtaaacgcgcgattgtagccaatttgttcaatctcccgacgtaaaatccgcacacaaagggcatggaaggtagatacccaaacatcttgagccccttcgccgagtaagttaccgacccgttcacgcatttcacgcgccgctttattcgtaaacgtaatcgccagcacgcgccatggtaaaacgtgcttttcttcaattaaataagcgacccgatgcgttaacacccgggtcttcccactaccagcacccgccatgattaaaagtgggccttctgttgtgaggaccgcttcagcttgcttatcgttcatcccttgtaacaattctttttcagacaaattagtcatccttccgtaaatgcaatcagcctatattataccaaactagataggtagaaaaaagcgaacacgacctagtaaaacggattctaatttttcgcaatcttctgccttgacctgggacgcgtttcataaattatactcaccttaatccaagaaaggtggtatgcatcatgattaaatacattttttctaacttagatggtacattgttaaaccaagacggacagctttctgaaaaagatattgcggctgtcaaagcaagcccactcccaatttccttgatttctgcgcgttcaccacaagaaatgcaagctacgattgatcagttagcgttaacgacaccccaagtcgcttttaacggggggttaatttatcaaccgacagatcttttcccaatggttttagcagaatatccacttgcaacctctgctgtcgcaacattaattgccgcattacaatctgaatttagtgacatcagtttaagtgcgtatgacttacaccactggtacacgcagacaattgacgctggtattgaggcaatcgctaagcaaaccggtcaattgccgacgctcatcaattttagtgatcaattgcaaaatccatttctcaagcttttcaaaattcaactgattatgcaaacgacacaacaacgggcaactgttgctgatttcatcaaccaatgccacttgcctggtctttcagtacaacaatcaggtacaatgaccttagaaattacgagtcatgaagccactaaagctaacgcattaaccaccatcttagaaaacactggactaacagtcgctgattgcgccgcgtttggtgaaggtcaaaacgacttagccatgttatcgctagttggccaccccatcgtcatgggcaatgccagtgatcaaatccagatggcgggtcaattcattacgaagactaatcatcacagtggcttcagctatggtctaaagaaatacattactaaagttaatcaaaaagtaggttaggattatgccaacaattcgtgatattgcccgcaaaagcggctattcggtttcgaccgtctcccgtgtgttaaatcatcaaaaatacgtctctgaacctgccaaaacggcaatcgaagcggtcattaaacaactcgattacgtgcctaatagcttagcgcgcgatttaagcttcggtcaaaataaaaatattggggtcgtcctaccgcacaatgaccatccgtatttcaaccaactcttaaacgggattatggatgccgcgttttcaagcggctatcacgttgtgctcctaccttccgaatataatcaagcagtcgaactagattatctcgaacaattaaaacgtaagaattttaccgcactcatttttacttcacatggtattgcactctcagtcttagcagagtacacgcgttatggtcaaattgtctgttgtgaagacccggggacccatcatatctcggccgtttattctcaccgtgagcccgcctatttagcggcattcaagtaccttaaagcccacaaagcacagcaaattggtctactattaagtcgtaatttagcgcaaagcccgacctggattgccgtcacgaacgcttatcaacaagttttcaactgccaacctgattccgagttaatggtcggtggcatgcgctcatttgaagatggctatcgcgccgctgaacaactggttgaaaaacagccaaccctcgcttgctattttacaaatggcgacgacattgccgctggtgtccgccaatatcatctggatcatcaactgccgaccccgcttttaattggtcaagaaaaacaattatccagttttttattgcaactgccaacaattgaccatcacttcttcaccctagggcaaaaagcgtttgaagtcgccctcagtaaccatcaccaagtttgtcgtttcgaatcagaatttattttgccataaaaaaagccactttaacctaacttttaggctaaggtggctttttatgtcggatgcttatgcaaacacccgatcaaaaattgtttgaacttgttttaagtgccattggtaatcaaaggcgtcgtctaaatcggcttttgaaagttcactcgtcactttcggatcggcttctaataattggcggaaatctttttgttcatcccatgctaaggctgtcttcggttggaccaaatcataggctgcttcacggctcagacccgcatccactaacttcaacaagacacgttggctgtaaattaaaccatgggtgatgttcatgtcagccttcatcttttcagggaagaccgtcaacgtcttcacaatccgcgtgaagcgattcaagatgtagtccaataaaatcgtagtatcgggtaaaataatccgttcagctgagctatgtgagatatcgcgttcgtgccataatgacacatcttccatcccggtaatcacatgaccgcgaatcacacgggctaagccactaacgttttcagaactaattggattgcgtttatgcggcatcgctgatgaacctttttgacctttagcaaagaattcttccacttcgcggacttctgttcgttgtaaatgccggatttcagtcgcaaaatgttcgattgaggtcgccacgaccgccatcgtgttaatgtaatcagcatgtagatctcgtgggagcacttgcgttgaaatatcttgggcccggatccctaagtgttctgtcacataggcttcaatttcaggcggaatattggcgaaagtcccaactgcaccactgattttaccggcttcaacgccttttgctgcgcgttcaaaacggtcttgattgcgtttcatttcagcataccaggttgctagttttaacccaaacgtcgttggttcagcatgcacgccatgcgtccgcccaatcatcacggtattttggtattcgtaagctttatcttttagaacggccataaaattggcgatatcagcccggattaaatcgttcgcttgtttcaaaatatacccttgtgctgtatcaacaacgtccgttgaagttagaccatagtggacccactttttttcatccgctaaggattctgaaacggcacgggtgaatgcgaccacatcatggtgtgtgatggcttctaagcgattgacttctgccaaatcaaagctagcattcgcgcgaattttctgcgcatcctctgtgggaatatcgcctaattttgcccacgcttcgacagctagaatttcaacttccaaccaagcttgataccgattttccgttgtccaaatggcgcccatttcgggacgtgtataacgttctaacataaacttctcctccaaatactacctaaatgctggtgatggtaaaacgtgctttttgtggcatctttctgtgcttaaccaaatttgccaaattcgcgattgcatcaccaactcgtcaaatccagttaatgctcaaaagataaccgccacaaatgcactctgttttgaaacgtgctccatcgggcatctttctgcggctagctacgtccgtccaacgatcgactgcgttgctcattcgccggcctatgctagtcctcaaaagataaccgcccgctgtcgcactctaatataagtctgccgcttcgtaattatcgattaagggttggatggcttgtccggttgctgtgaccgatccaatctgttgattggtcgtgacgttgtgcaaattaaagtaccaatccggtttgatcttcatctgtgtttgaattaatgaccgttgtgcttcttgaatccctaaggtcatccccgcattattgaggcgtgatgggccgactgccaactgacagatggccttcaaatgatattcatattgcgagaaattcaaggtatgtgtcaagacatcgcccgttgcgtgcggtgttggcataattcgtttcacataaatattcatagcgggtgttaaaaagaattcaaccccaaaaacacctgtatagtctaatttttccccaattaagtgggctaatcgattaatttcagtcgcaacatcttgattaatccgtgctggcacaagcgacattttcaagcgatgatcttcaaactcattttcgatgactggcagtgtcacacacttaccatcttcagttttaacgaccatcactgatagttcttgtgcgtcgggaatccaagattccaaaatataagtccccaactcaagggcagcttcaatgttttcaaggtcactcggttgttgaataaaacgttgatactgcttaccgtaacctttttgaatgggttttaagatacatggatatccgattgaatcgattgcatcttgaatatcatctacatcaacaactgtcgcatagggcggaatattgatatttaaatcactcaaaaagactttttcgaggtaccgatcttgcgtcacagacaacacattactgccttgaggtagataataatgttgtgccagttgttcgagcaccgtctcatctaataattcattcgtataggtcaacacttgactgacttcaccgagttggactaatgtttgataatcattgaattcaccatcgatctgactatcaattaaacgtgcaaatgaggtattttgcatctgcggggtcacaatcgcggctacccgataccccatttcttttgctttgagcgccaacatataggcccgttgatcatttccaataattccgatggtttgtcctggataaataactggcatcatattacctgctttcctgttcaccaaactgtatacccttattatagcgaatttaagcgttgtctgcctaatactttcctccatgataacaaatttttagacaaaaaaagagtgcctctcagcactccgttaaataacatttatttattttcgtctaaaaagacgacttgaccgtcttcaaacgctgcaattcgtgctaaagattccacttgaatgccgcgttgatctaacaattcgcgacctttttggaaagtcttttcgatgacaatcccgacaccttcaagttgtgcgccggcttcttcaataatagaaagtaagccttcaaccgcttgcccgttggctaagaaatcatcaatcactaaaacgcgatcgtctgcattcagaaacttcttcgaaattgaaatgtggttattcactttcttcgtgtatgaataaaccgttgcgctatacatgttatcttgtaacgttaaactcttgtgctttcttgcaaaaacaatgggaacgtggaatgctaagcccgcgaaaacagcgggcgcaatgccagatgattcaaccgttaggattttagtaatcttcttatccttaaataagcgttggaattcttcacccattgcagccattaaatctggatccacttggtgatttaagaagttatcgaccttcaatacgtcttgacctaatacttgaccatcttttttaatgcgttcctctaatagtcgcacgctgagctctcctttgtagcatcgttaaacatcactaccgatagtagtaacgactaataatgttttctgaaattgaattaaaaatagattaccacaaaaaaagcaacacaacaagctcaaatccagttattcagcgatttgaaaagagcctgtcacaaaccggaatttgtggcaatctcttttgagattaattagtagcagatttcccatgatttgtttcatagcattctttattgatcatattggtcgaggtggtaagccttaacgagctcaattaacttcgctggataatcagggtcagtcgcatagccgtcttgttgtaatgcatgggcagcctgctcataattagtggccgcgattacgtgtgcatactgcgtccggttccaagaggtcccataagcaaacaattgtacatggtcaagcatcgattcttgataattgttatatactctaaaacgcgctgttgtcgttacccactgaccatttaaatattccttggtcgtcatttccttggtgttggcctcattatcacccttaataccgaaataattatggtattgcgcagcaagtgagctcttcccccaatcactttctaaaatggcttgcgctaaagtaatacttggtaaaacatgatatttcgtctgtaattcttgggcatatggcaccatttttttaataaacgcttgcttcttagcttggcgcgattgttgttcctgtctggcttgatcggcaagttcttcttgggccttttgtccattataccgaactaataaaacgagcccaattccgagaataaatagactcactaaaacgaccactagccaatcggttgggtggcgtctcttcttagaatagtagttagctgttggtttgcgttttgtcgtcttgcgtttacgtttttttgccaatcctctgcctcaactttatctgaatctattctatattgtacacaaattcattcagaacaccaatctttaatttgtaacccccctttaatttctatttagcgcttttattgctataatattggctgtaaccgattacgatagtaaaggactgattttattgacaacgcttaactggggaattatcggcttaggcaatatcgccaatagtttcgcaacttattttaaccaacctgatggtcacatttatggggctgcttctcgttcactcgataaggcacaagcctttgccgaccaatacaatattccacatgcattcggtagttatgccgacatgctcggtgatgacaacatcgacatcgtctacattgcaaccccccacaattatcacttcgaaagcattatggcgagtcttgaagccggtaaacacgtcttctgtgaaaaagcgattacgatgaaccgccgcgaactcaatgcagcaaaggctcttgctaacgaaaagcacttgatattagctgaagcaatgaccatttatcacatgccattgtttgctgagattgaacgccaacaagtcgctaatcacttgggcgctttaaaatcaattcaagtctcttttggaagttataaagagcttgatccaaacaatcgcttcttcagtcccgcacttgccggcggtgcaatgcttgatattggtgtttatgccctctcatttgcacgtcggatgttaactgctaaaccagaacttgtagcgacgcaatgggtgccatcagaatccggtgttgatcagcaatcaacattacttttaaataatgccaagcatgaaatggtgactgttaccttaaacattcatgcgaagatgcctaaacaaggtgttctcgtttatgaaaatggctatgtcaccgttgacgattatccacggcctgacaaagccaccctcactttcccagatggtcgcgttgagaccattcaagcgggtgacgcaaccaacgcaatgaactatgaactccatgatttccaagaaacagtgcgcggaaatcaatcaaacgataccctcgaattatcaagcgatgtcatggacatcatgtcagacgcacgtgctgaatggggctttgtctatccatttgaaaaacgcactgatctcgattaatccattcaaaaaacctggccaatttggtcaggtttttttagagtattttagtgagaaccaccatatcttttaggcgaatcccattttcatagattggcgtttgatattggtcgaagaagtttttgcgaattcgttcgaaccgaaagccttgacgcaaataaaaaccaatcgctgccaaactaccgtccccagtgccaactagcaatgattgaaacccttggtcaattgcaatcgtctgaatttgagtcatcatttgcccaccgaatcctcgatgttgccattctggccgtaccgcaatatttttaagttctacctgctgatcgttgagtgccatcagatggaaggccccgatgacttgctgctgatcgcttaaggtgtaaaattgcccatgcatcaaatagcgttcaatcatgccgacttcttcatccgctaacaatagatcatccagccactgtcgccgtgctgcgccctcaatcaattgatacgttaacatctccagctcaccacccaatcaaaaaaaggggtcgcgacaaaattgcttttgccgcgacccctgggttaatttttaaattagtttttgtttacgttaacagcttgtgggccgcggtcgctttcttcgatatcgaaagaaacgctttgaccttcttcaagagtcttgtagccttcaccttggatagctgagaaatgtacgaatacatcactaccatcttcgcgagttacaaagccgtaacctttttctgcgttaaaccattttacagttccgttttccatgagaaaaatcctccttgtgtcgatgacacattataaatttgtgtatttctggtggtccgatggaagaaagttcttttggaaacattcgtaccgcaaccattcaaaaagtacaaacatagtgtaacacaggcaacaaccattggcaaccatttggcaataaaaataaaccgttttctatcacggacaatcagcatccgtgtttttagacaagtgttattttatatgttgaatcatgccccaaatgatttggctttttgctttaattacgttaagatagcagtataactttttctcattggagtgcttgcttatgctaaaactattgaaacggctattaccaattatcttcatcggggtgagcctagccgcttgccaaaaaccgatggatactaaacatcaactccaagccgatatgcaaaccgttgaagatgcgactaagcaacaacgaacagctctttcaaccctcgaaacaatcggcgatccagttcctgataactatctcacgattcaaaaaaaatatcccgacgaaaatctattaacgattgaagatactaagattgcgacgactgcggccaagcgcgaagcagcctttcaaagtcttaaagaacaacaagctgtgctcaaaccggtcattaaacgcctcaccaaactggtcaagcaagaaaacgatgaattgccgattgaacaagtcaaagatttaaatcaaagtcttaagatttcgacacttgattatacaaccttggccaccttctacaacgcggccactaaagcatctgatgaattttacagcgaccatacagatgctgatgcagacgaagacagtcttaaatcaccaatcaatcgtttaaatcaatattacagttcagtttatcaacaagccgaaattgctaaggtcaacatgaacacagttgctgcgcatgctaagaaagtgcaaaaacaactggaataaacaaaaaaggagttggacaaagtcacgtttgtccaactccttttttcaatctttaattattcaacccgtggcggaccacaatcgtcggctgtagctacccgcacttgttattgcgtccgtttaaaccgcatgagtggtgttgcgactagtggtgtcaccacagctgctaaggttgcttccattacagcatttaacgcaacaacgccaagcatcacgatgattaaatgggtcggatcagtatgatacatccctgccgcttggtgtccgtaaagcacacgcgttaagccaatcactaaaatggtattgattaaagccccgaaaatcccagctaaagccattgcaccggttttacgaattttagtttgatataagtgttggaacgtaaagccagcaatcatcccagccatcaaccgcggtaaaatagcgataattggattttgaaagattaaaagtgaaagcggatcgcctggagaggtataggctctaaataatgaaatcaaaccccaaattaatcctagaatcgccccttggcgtgtgcccaggatcacggccccaataatgaccgttaaatgaattgttgttacggctggtagcccaggaatgatattaatataaccgaccatcggaataaaactttgaatgattaaaaaagcggttaaaatcgccataatactaatcgtataagctgatgaatttttatgtgtcatcctaactgactcctaaactgaatttattgctcattatagcgatttgtcaccctagtttcaatcatttacatcaagggacaaaaaaaggtaattccaattggaattacctaactgaattatgatgcgggtgagaagactcgaacttccaccgggaaaattcccgacaagatccttaatcttgcgcgtctgccattccgccacacccgcgtaacttgctttatcactttaagccacgtacattagtataagagaaacgatgattgaagtcaattaaaattttactttggagacgattacatgcccattatccccgctaaactaaccgatattgccaaattaaccaccctgtatcaacaattaacgactgaaatgcatgtgctacaacccactaattaccaagctgattacacgcctgagttctttgactggcaacaaatgataactgatccactacaagcagtctttgttcatcaaaaccaagatgcgcaaatcgatgccttttgtcacgttacaacagcccaaacaagtccctcacccttgtttatcgcacaccgctttgcttatctcacaacactgtatgttgcaccagaggcacgccgccaccacgtcgctacacaactgctatcgtccgcaaagcaatggcaacaaacacaagcgctcgattatttagaactaaccgtgttagggaataatccggctgcgttggccctctatcagaagctgggctacaccactcagaatcaaactttacgcgccaactaaaaaaaggccacccctaaacataggggtggccttttttcattgaatttgtgtggtttgataaatcagtcgtccatgacaccgccgacaaacatagcgagccgtattcattcgacggcgacgtggatagacttgcccacagtctgaacatttataaatcacaattttgctcgatttagctgtcttttgtgcagctggtgcatagcgcgcacccccgacttgtgcaagtaattgtttaaactctgcgtctcgatgacggtaaccgcgatgcaacagatgcaggtgataatggcaaagctcatgcttaatcaccccttctaaggtctgtgtatcatgttcggtcaacatctttggattgatatcgatatgatgatcctgtaaatgatagcgcccgccggttgtttttaaacgccgattgaaatttacttgatgcacaaacggccgattaaaaaactgcaacgataaccgttcaatcaattcagttaaggcttgatcagtcatttgcctttggcgctttcattgtcagttgtacgcgttcacgttcttgatcaacactcatcacccaaacctgaacgacgtcgccaactgccacttcatcagaaggatgtttaacaaagtggtttgccagttgagaaatgtgcactaagccatcgtgtttcacaccaatatcgacaaaggccccaaaatcaatcacgttgcggactgtgccttctaacgccatattcggtttcaaatccgccaaggttaagacatcatgacgtaacaatggcgccgtcatctgatcccgtaaatcacgccctggtttttgcaaactacttaagatgtcggtgattgtttcaatcccgacctctaattcagccgctagagccggtacttgcatttgtgcaatcgccgtcttcaacgcatcgcttcctaaagcatcaacggttaacccaaatgatttcaaaatggctttagccgttggataactttctggatgaatatcagtattatcgagtggattgtccccattaataatccgcaagaatccgaccgattgttcataagctttaggccctaagcgtggtactttcttcaaagcactccgcttttgataaaggccgttttcattgcgatattgcacaatgttttgagcagtagttgctgacaaccctgagatatgttgtagcagctgagggctagccgtattcaggttgactcccacactattcacgacatcctcaatcactgtatcgagttgcacagtgagctctttttgcgccacatcgtgttgatattgtccaacccccactgcttgtggattaatcttgatcaattcagctaacggatcttgcaaacgacgggcaatactaatcgcacttcgttcttcaacgtgtaaatctggaaattctgcccgtgctgcatcactcgcagaataaacagaagcccccgcttcattgacaatcacatagaaaatttcccgggaaatagatttcaaacacgtcgttacgaattcttctgattcacgactcgcagtcccattaccgattgcaatcatttcaacttgatatttctcgagtaaagcagtgaattcatccgccgcttttgatcgtttgtcagctgaagctggtttgtgtgggtaaatgactaacttatccaagaatattccagtgccatcgacaacggctaatttacacccagtccgataagcgggatcaaagcctaatacaactttacccttcaatggtggttgcaacaagagatgcttcaagttatcaccaaagacactaatcgcttgttgatcagctttctcctttaattgcttgcgtaattcacgctcaattaccggtccaataaaccgcttataggcatcttcaaccgcagacttgatgaccattgctgacgctgaatcttgtccatacaacagatcttggctgatccgactggcaattacttgatcgtcaatcataattttagctttcaaaataccttcgttttcaccacggttaatcgctaaatattgatgttccgctaccttcgttaaatcggcagtgaaatcataatagatttgataaacttgcttctcatcggctgcttcgtctttaacttgactggccaactgaccattttgccaagtatattggcgcacccaattccgatattttgctgtttcactaatattttccgccaatatttcatgaacaccagctaaaacagcagctgtatcattgattttttgatctggattgaggtaagcttcagcttttgccaataatgcttgttcggttaagctaggtaaccctgcgataaactgcgcaaaaggttccaagccggcttctttagcgatggttgctttggtccgtcgtttttgtttatagggtaagtacagatcctctaaagcttgcagttgcgttgccgtttcaatttgttgtttgagttttggcgttaatttttcttgttcagcgatatttttcaaaatatcggttttacgtttttcgagcgtcgttaagtattgaaatgtgctttcaatttcacgaatttgaacttcatcgaggcttcccgttcgttcttttcgataccgcgcaacaaacggtacggtattgccttcttctaaaagacctaacgttgctttgatttgttgtggtcgatactgtgttaattgttgaatcacaagattttgaatatcaggcatctgattgcactccttttgcttcaattaaaaaaacagcccccgacttgggaactgtcaactttcgccctaagcgattcttgaaatattttggatgtatttagaaatccgttccgttgctttgtcttgattcatttctgaagctgcaaaagcttgcatatcaacggtttgatcatcatgcatgcttgtaattaaatcttcacagccttgaatgaaatcagcgtaagcaccgattaaacgttggttgttccccatcaaacgagcgggcgcaacaactgttttgaattgtgctaagaattcgtgatattgatcaacaccatctctgaagatttgtgctgtcttttgatagtcttgttcgctcatttcggctaacttaccatcagcaacggctgcttttaaaggggtgaaatacttactcatcccttcttgtactttttcagtattatcgattaaatcgttgacagcttggccgtatttggcaagcttttgttgcgttttattcatgtccatcctcctagtttcctatggtttagtatactaatttcccaatcggcttgcaattaaaatattaaagcatgtgtcattaatagaaaaggcatgcttagttcatcaaaggacatttacctcattaaaaaaacgctagcgacaaaatctcgtttgtcactagcgtcgattattacctatcttctcttcaacattctactcgtccacgactgaccaaacattaactttgtcaataagtcgatacaagcgaaaataactaaataaagtaagaaactcaacaaccaattattttgaacgtgagtaatccgttccagaccaccaaagatgaaaagtgatatcagaaactgtaagaatatttgcatacgtaatcctccctacaaaactcactaacataaaagttatttaatcacctttattatagtttaattgacaagcactttacaaggttggcaacaaattatttagccattctccgctggaagaacttcacaatttccacaatcacaatcaatgagaatgaggctgctaggacaattccccattggtgaatatcgagatgtgacacgtggaataggccgtttaagccaggtaccataatcgttgcggctaacaggaggaatgaagctaagacagcccagttgaaagctttattcttgaaaaagccaactgtaaagattgattggtgcactgacttcacgttaaacgcgtggaagagttgaatcatccctaacgttgcataggccatcgttaacgcatcagcatgtgctaagccgctcgcttgatgcactgggtacgtaatcgctaaggcatacacaccaagcgtaatcccaccttctaagagaccttgatagataatcgcttggaagacaccgccggagaagaagtttgacttgcgcccacgtggtttttgattcataatccccggttcagtgggctcaacccccaacgcaatcgctgggaatgtatccgtcactaagttaatccataagatgtgcaccggttgcagaatttgccagcctaaaatcgtcatcatgaataaggtaaggacttcacctaggttagctgacaataaatattgaattgatttttgaatgttggcaaagactttacgaccttctttaacagccacgacaatcgttgagaagttatcatcggcaagcaccatatcactggcgccttttgatacttctgtcccggtaatccccatcccaattccgatatctgcggacttcaaggctggcgcatcattgacaccatccccggtcattgcaacgactttaccatgtttttgccaagctctaacaatccgcaccttatgttctggcgcaactcgcgcataaactgcgtactgactgacttttttagcaaatgtctcgtcatccatttgatccagttcggcacctgtcacaacggccgcatccgcatcttgttcaggtgtaataatccctaaacgaagtgcgatggcttctgcagtatcccggtgatcaccggtaatcattaacgtccgaatccctgctgaatgcgcatcagttacagcttgtttggcttctggtcgttctggatcaatcatcccgactaaaccagcaaagattaactcatcttcaatcgtcggatcaattgttgctggtaagctatctaacggtttatacgctaatgccaagacacgtaacgcttgtttagctaaatcgtggtttgttttgagtaaaaattgccgttcatcttcatctaacggttgaacatcgccattggcatcaataaaatgactcacgcgtttgagtaattcatccggtgcacccttagtggtcattaataattgaccatctttggcttgatgaatcgttgtcatcagcttccgttctgaatcaaacggtacttcacccacgcgtggtgctgctgctagggcatcttggatcacgaaacctttatcacgcccataagcaattaaagccgtttccgttggatcaccaattaactggccatcctctgtgattttcgtatcgttggcaaggttcataatgcttaacgctaaatcatcgcctgccaagtcggctgatgcttcttgcaactgattattggtaaaaatcttttctaccgtcatttgattcatcgttaacgtcccagttttatcggacgcaataatgtcggtactccccagtgtttccacagcaggtaacttccgtaccaacgcatttcgtttaaccatcttctgtgtcccaagggctaaaataaccgtcacaattgccggtaatccttctggaattgcggcaaccgctaatgagattgaggttaataacatgttaattggtgattgcgcgtggcgtaagtagccgaccacaaatacaacagccgcaatgattaaaatcataatcgttaaactcttaccaagttgacttaaattcatttgcaatggtgttgtggtttcaccagcttgatttaacatcccagcaattttaccaacttcagtttgcatcccagtgcccgtcacaaccccgacaccacgaccgtaagtcacattactattcatgaatgccatgttggtccgatcgccaatcccactttcaggatcggttaacgttgcaacagtcttatcaaccggtaccgattcacccgtcaaagccgattcctcaatcttcaaagccgctgattctaacaagcgtaaatcagctgggacgatatcgcccgcttctaatagcacgatatcaccgacaaccagttcttcactcttgattttaacaatctgcccgttacggcgtacatgtgcgtccggggttgccatctcttttaaagcatcaattgcttgttccgctttggcttcttggaaaacaccaaaaacggcattcaagataacaacggcgagaataataatcgcatctggccattcatgtgctaaaaagccggcaatcattgccgctactaataagacgataatcatgaaatctttgaactgttctaaaaaacgaacgaacaagctttttcgtttagtctcagtcaactgattacgcccgtatttagcgagtcgttcagcaacttggtcttgcgttagcccatcagttgttgtggctaaactttttaaagtctcatccgttgattgggtaaagaatgaacttggttgatctgtcattgtcgtgcctcctatagatagatttcggggtaaaaaaagagacctatagagaattcaaagaatcccccataagtctcactaattaagataacaccagaatattgccttgttggtggcgttatcgcagacaagctgccagttactcccttatcgttaaactaattataagacagaaccaatctaaaacgcaagtaaaacattattctgacgtccaattaatttagcggataaacaaaatccagccgattaacgccaaaatgtatcaaaaacagtaattggtaaatgccgcttgtgcgctgtcttttggtaccacttttcaatcttggtagcagcctcttctgccacttcacgaccctctaaataatcatcaatttgattataagtgacaccgagtgctaattcatctggcaatgctgggcggtcttcttcaagatcggcggttggaatcttttcgtaaaggtgttttggtgcctttaattccgccagcatcgctttgccttgacgcttatctaatctgaaaatcggtacgagatcagcaccaccatcaccgaacttcgtatagaaaccggtaattgattcagcagaatgatccgtgcctaaaaccgcacccttcatttcaccagcgataccgtattgcgcaatcatccgcacacgtgccttgatattacctttattaaaatcactgactgtcacttctgtttccgccagtgcttgaaccattgcatccactgacgctttgatattcacacgccggacctgatccgcttgcatgaaatcaatggcagccattgcatccgattcgtctgcctgctcaccatatggtaatcgaacagcgatgaattgataggtttcatcacccgtttcagcacgcatctcacggaccgcttgttcagctaaagcaccgactaatgttgaatcttggccaccagaaatcccgaggacgtatgtttttaaaaatgtattcttttttaaataatcttttagaaaatcaactgaccgtcgaatttccgctttcggatcgattgtaggttgggtctttaaggctgcgataatttcagcttgtaaaggtctcatgattaaataccaccttttttaaatgttagattgctaacttttttgaaacgcgcttccttcaacagctttgtccggcaaataagcgctagcgcacttattcaccagacttcactatactcaaaagctaaccgttgaatgaaccactctgcttagagcgcactctgattttggacttcttctttgactcttctgatttgggccattttgtgatcccatgtgcgttgtgaaaggtcaactgggtaatcttgcgggttcaagtcccgcttgtattcatcccataacgagtcgagattttcactacagaacttcttaatcgcgccaagttcgggcaatttgtaaacgcgttgcccgtgttcaaaaatcgtccgtagaattggccgcgcattaaagtccgtcacagttttattaatgtacgtgtaatttgggtggaacatataaattgaatcttgttccagtggatcttcatcccaaagcgtaatgtaatccccttcagatttaccatcaacttttttagtgattcgccaaacttgcttgcgccctggtgtggaaactttctcaacattacttgaaagcttgatggtatcgaccatcttcccgtcgccgttttcaatcgaaacaagcttatagacagcccctagcgcgggttgatcataagccgtaatcaatttcgtgccgacaccccaaacatcaattttggcttcttgcatcttcaagttttggatggtcttttcatctaaatcatttgaagcgtaaactttagcatcggtaaaaccggcttcgtccaattgttggcgcacgcgttttgaaatataggccatgtcgccactatcaatccgcaccccttggaagttaatcttgctaccaaattcctgagcgacccgaatcgcacttggcacaccacttttgagggtgtcatacgtatccaccaagaaaacacaatcgtgatgcgtttcagcataagcgcggaatgcttcataatcattgcgatagacttgcacgagtgaatgcgcatgcgtcccactggctggaatcccaaaaatctttgaagcacgtacgttacttgtagcgtcaaaaccgccgatataagctgcccgagtgccccataaggcagcgtccagttcttgggcacggcgcgtcccgaattccaaaacaggatccttaccgaccacagatttaatccgtgcagctttcgtagcgattagtgtttgataattgatgatgtttaacaaggccgtttcaattaactgacattgcgccaatggtccttcgatttgtaaaatcggttcattcccaaaaaccaattcgccctcaactgctgaacgaattgttaaatcaaaatcaagattggctaaataatcaagaaaatcagctggataccccacctcatcacgtagataagcgatgtcactttcggtgaagtgtaagttttctagataattcacgatgtgttctaaaccagcaaaaattgcgtaaccattttcaaatggtaattttctgaaataacattcaaaaactgctgtgcgattgtgcaagtcctttttaaagtaagtaagcatcatattcagctgatacaagtctgtatgcaacaaaagactgtcatcagggtataagtttggcatgttaagctcctaattagagatatatttagtataactatatcataaaataaaagaggcatacaaaaaagacggtagaaaaccgtcttttttgtttgagactagaagaaacgccaaccccatttattaaaatactgtgccatggacttcaagaagatcttaaatcccttgaaactgcggtgggatgccattccataaaaatgagtgacaaccgcgtctggtacatataaaatcgtatgaccgctttggttaattcgatcacaaaggtcattatcttcgaaatacataaagaagcgttcatcgaaaccatcaatagcccgaatcacatcagtccgcgtaaacatgaacgcaccagatccatattgaatcacttgccgtcgatccgttaaatcccggcattcataagccgccaagcgtttttcaaatagcttcttaacccatttaaaaggtacaaagcgcagcatataatcgaagacatctagcttccgccgtactaaatgttgggtcgtaccatccggaccaacaatcttcggcgttagcatccctaagctatcattagcatcttgatccgctaaaatccgatacatccgttcaaatgcgttttgatttaaaataatatccggattgcaaatcagaaaataatcggatgccgtcagcttcaggttggcattatgcccatgaccgaacccaagattctcttggccttcaatgatttcaacatcatctgcagcataggcttttaattgcgccaaatactcaggtgttgacccattatcatgaaccaatacttttaccgggtattgccccaagacagttgccttgatactatctaacgtcttaaagacgtattgactattataggtcacaatactaatcgtcaccgttttatccagattattactcatcatctcatcctaatcaatttttgccataaatttttgtaatgccacttgccaggttggtacttcaaaaccagttgccttgaccttcgtcaaatccatgattgaatgtcttggacggaatgctttttgaggatattcgtctgatgttaccggactcacttctacgtctttatccttcaagatttcgctcgcaaattcataccaagtacatgaattgtcatttgaaagttgatacaagccatacggcacgtcgttttgaacagcgtataacatgaattcagccaacgtccgggtccaagttggacgaccgacttgatcactaacgactgttaaatgatcatgcgtcttcgcaagatttaacatcgtgtaaacgaagttcttaccatattcaccaaagacccatgaagtccggatgatgtagtatttgctcattgtatttgcaacggcttcttcaccagccaattttgtgcgaccatattcattcttaggtgcagctggggtttcttctgtgtacatttgatcattcgtaccatcaaagacataatccgtactaatgtaaacaagcgttgcgccgattgcttcagcagcattggcaatgttttgcgttccaaccacgttcactttgtaattgattgacttgccaggttcttcttcagcagcatcgacagctgtataagcagcacagtgataaaccaattccggcttattcttttcgaagtaagttgtgactgccgctgaatcagtaatatctaactcagtagcatctgtccccacgtattcaatttgattttcatctaataagtgccgtaattcggtccctaattgaccatttgcaccagtgattaaaattttcatagaataaatctcctctattttaattcatccttaacaacttgtaatgccgcatgaatcacttgatgcatatcgtagtaacgatattgccctagacggccaccgaagaccactttgggttctgtcaccgataaatcgcggtatgctttgtataagcggttatttttgtcgttattgattgggtaataaggttcgtcaccacgtgaccagttcgcaggatattccttcgtcacgattgttttattcttatcgcctttaccaaattcaaagtgtttatgttcgatcacccgtgtataaggcgtttcggcatctgtatagttaacgaccgcgtttccttggtagttatcaacgtccatttcttcggtttcaaagcgtaaactccgatattcgagttcccctaattgataatcaaagaattgatcaatcataccggtaaagatgactttatcgtattgatcgatgtagtcttgtttcttatcgaagaaatcaacacccgtttcaacatcgattaaatcactagccaacattttttcaatgatttgtgtatacccaccaattggaatcccttggtatgtatcgttgaaataattattatcatacgttaaccgtactggtaaacgacgaataataaatgatggtaattcggtagccttttggccccattgcttttcagtataccctttgattagtttttggtaaatatccgtcccaattaatgaaatagcttgttcttccaagttttctggttctttatcgcccaacaccttgcgctgttccgcaattttagcggccgcttcggcaggtgttgccacaccccataacttattgaacgtattcatgttaaatggcaagttgtagatttcacctttgtagttagcgactggactattggtgtaacggttaaactctgcaaattgattaatgtattcccagatttctttgttgctagtatggaaaatgtgggccccatattggtgaacttgaatgccatcaatttcctttgtatagatattaccagcgatgtggtcgcgtttttcaattactttaacgtggttcccacgtttggccgcctcgtatgcgaaagttgcgccaaagagtccggaaccgactactaaataattagtcatattattttctcctaaatctaaattattatctcaatcattaattaacgagtaactttctttactaatctgacaatatctctgttaattctagttctcaataatacaagtagcaatacatatacaattgtcacaataattgaattaactaccattgttaagaacaaactaggtaacacaattttaaaattcaggacagcaagaacggtcattagaaaagcaagtacatacctaagctgttcatgaactagataccgtaaatctgcttctttacgaaccatgtaaattctcatagaacatacgataaactcggttaaaataataaccgccgttccgccatccgctccccagatattaacacaaatcacatttaaaataacactaattaccgcacccacaattgccggaattgcatattgtttataatcaccattgaccaatgagaattgactgccaaatacttcaccataggaaataaaaatcattattaaaccgacccataacatattattcgtcattggtgtatatgatttcccataaaaccacggtacaaattcggatgcatttaccattagtaacatagtaaacagttgtgcaactaataatgtatagtcaagtgatgtttttaataactgatccactttttcattattagcatgattcattcgaagttggaccattcttggcattaaaatggtactaactgaagtaataagtgttactaacattcgcgcaatccgttgtgattgatcgtaataagttaattggacaggccctgcaatccaacctactagcgtactatcaaaattggtataaaattgaactgcaagctgtgggataactaaaatcatggcttcttttaaaaagattgacttagaaaagaaccctttaaaacttacttttgtgatgatcccctttaaattaagccagaaaataatatttgcaaaaaagatgcttaaactattaattaatacgtaataacctaaatcactaggtttctttacaaatataaaaatcattgcaacagaacatattttaattaaggtatttcgaacaacaacttttctaacttctcctaatcctatgaagacccaggaaatgtcaattgcgaatccaattaaatatggaatattcaatagcaagtatgttttatattcactgaacattgcaaagaacgtatacgccagaatcactaaacaacctactaaaaactgtattttccataactgtacaaagttactacctagttcacctttatctttgtgggattgggcaataattcttgaacctaattgattcatccccatcaaaatcacaaaactcagaaacatggaaatagacgtaatgaatgaataactccctagtgctcttgcacccaagacacgtgctacatacggtactgtgataattggcaatgccagtatcaacaactggtaaataccgttgtagattatattgttaagcgtctttttcataattgctccatatctttcaatatcctagataatacatccacattattgaccgtttttagcgtagttggcttccacggctgctttttctgcttgccaccagtcttcattgcaattcagcgtgaatttgaccgtcttttttgtttgattttaaagtaatggcataatcattgtcgtccgtagccagctcagtggcatgactaagatcattgctggtatcatgtctgcaattggaaattcgcgaattttagcaattctaaagccagtggcgagcatcaagaggccgccgcaagctttgaaatctgcaagcattgttggattcgttagtgggaaaatgagtttggcgagtaagaaaatgatgtaaaagataatgaattgcggaatcgcaatggttgaaacgacggagccaagattgcaggcaaagatggcaggcaaagatggcagcagtaaagaaatctagaattgatttagaaattagaatcgtattgttgcctgtcataccagcatctaatgtcccataaataccggtcccaccggcacaaaagaggacaatcactgtcacgagtgctgaaataaattcggtatctgatagcgtattgtttttacgcggaaaaatttagaaattggccgttccatcaagacggcaccgcgatcaatccagcgaccgaagtgaatgagtaggccaatcccagtaccgagaacaactgcgaagatgactgcaggcatgttcttcatttgaataatggcattgatgcccattcccatcgaagcaacaccgaagattaaggtgagttctgttttaaatttagttgataatttatctcccaataaactaccgaatagaccgccaaataagacggataatgaattaataatcacgccagttggcattgagaagacccctttaattttaagtttgcatattcaaccataccaatttaaaagaaaagaatcaatttaattttaaatgttagcgcttatatatattcgatgggagtcttgagctagaccaaaaaacgactaatcatttgattagtcgtttttttactgactattcgaatcgcaaactaggcttaaaacgccgaatcagtgccttgggttggttataggcccaatgatttaaaacggcggcaatcaaaatacaggggacgatatccttttcttggttgacagtcaattgaaaggctggaccgctgcttgctagaatggtggtcgcttgcatgatgggttgtgtatggtagataatgcgatattgattttgcgttaaatctcccataattaaccaattaagttgtttgacatagataaactcatgccagacgccccagatctttttgagttgaccaatccgttcatcgttttggaaaaggtcaaagtcaggtgaggggctaattgtgacttggcgaatttcaccgagtaagtcgccggtgagtgagtaaaggctgaatacgtcatgccgaatcccacgctttccaataagtaaataacgcggttgttcttgatcgtcaatcacggttgagacaccacgtgaagcactagcctggtgtttaatgtagaaaataggcatcaaagatcacttcttttcagctgtacgattcaagtcaatcgcgtgataaatcgcttgtgcgacgccgtcttgaatgttagttgcagtttgatagttcgcaagttccttaattgttgggacagcattgcccatggcgacaccaatgccagctgttttgatcattgaaaaatcgtttaagttatcaccaattgccattgtttgctcaactggaatccctctttgttcagcataggcggccaaagcgatgcctttttgagcgtcaatgtggtttatttcgatgttattacttgaagaggaagttacaactaaatccccgcgggcttcacaaaatgccttaattggtgctaattcggtcattccctgtgtgctaaaagcgatgattttaagaatcttaaccgttggatcgttaataatcccttgatagtgatcatcgacgtagttaatattcattaattccaaacgggctgctgctaaagcaaccgcaattttataactcgtatcgggattgaggttgacgagtaaatcagcgacattttggatgcgactgactttgctatctgaataattaccggcagtcgtcatgagttcgaagtaaatattattttcgcgtaaattttctgtgacggctgtcaccctttcggaatcaatcggcacattcaaaacttcattacctaaagaatcaaaaatttgggcaccattcatcgtaattaaagtaggttggatgtcatcactgtcaattagggggagggcttcagaacgactgcggccggtagccaccacgaattcgatgccggcgtcttgggcagctttaatggcggtcatgttaccgtctgaaacctgcattttgtcgtttaataaggtaccgtccatatcagatgcaataattgaaatcaaaggaattcctcctgaaaacgtattattagaaacttacctctatcttagcatgcaagctacttttcttctagcaacttatgttaaaacacgataaactagttaatgaggtgagcagatgaaaacaattattcacaatgagtggcaaacgattctcgcaccagagtttgccaaaccctattatggtcagctccatacctttttgaaacaggaataccaaacgaccacggtttatccagagatgcaccatattttccaagcctttgaatggacaccgtttgaacaggttaaagtcgtcattttaggacaagatccttatcatggcccgaaccaagcccatgggtgtagtttttccgttttaccaggggtcaaagtcccaccatcattgcaaaatatttataaagaattgcagacggatgttggctttcaaccggttcagcatggctatttaaagagttgggcggatcaaggcgtgttcttgttgaacaccgtattgaccgtgcgggcaggtcaatcaaattcgcatcgtaaacaaggttgggaacagctaacggatgcggcgattgctgcattgtcaaatcggggacatgtggtcttcattttatggggaaacgcggcaaaggataaacggcggttaattgatgagacgcaaaatgcggtcattactgcagtacatcccagtcccttgtcagcctatcatggtttctttggctctaaacctttctcacagacgaatactgcccttgagcaatggggcatggcgccaattaattggcaattaccacaaacagtcacggtagaataatgaagcgttaccattgttgacttgtcgcggtattagaaacgttgtatgattacattagcaataataaaatgcttactggaggttgcaattgtggatttatttgaaagcttaaaagcaaagattaccaatcggcaatttaaaattgtttttccggaaggaacagaaccaagaattattggtgcagcagcacggttgaatgctgatcggattttgaaacccattttaattggggcaacgaatgatattcaacaaatcgctgctgctaaaggatttaacttggacgggataacgattattgatccacaagaatatccaacagctgactttgaaaaaatggttgccgcttttgtcgaacgccgcaagggcaaggcaacccctgaacaagcacaaacaattttacaagatcctaattattttggcaccatgctggtttatttaaacttagccgacgggatggtttcaggtgccgtgcattcaacaggcgatactgttcgaccagcattacaaattattaaaacaaaaccaggtgtccaacgcacaagcggggccttcattatgcaacgcggtcgcgataacgaacgttacttattctcagattgcgccatcaatattaacccgaatgcgcaagaattggctgaaattgctgtggaatctgcaaagacggctgagttgttcgatatcgatccgaaagttgcgctgttgagcttttcaacgatggggtctgcgaaagcagacgaagtcacgaaggttcaagaagcagcacggattgcacatgaaattgcgccagaattagacattgatggtgacctacaatttgatgccgcatacgtaccagttgttgcgaaccaaaaagcaccagattcaaaagtggcgggtcaagccactgtgtttgttttcccagaattacaatcagggaacattggctacaagattgcccaacgttttgggaatttcgaagccatcggaccaattttacaaggtttgaatcaacccatttctgatttatcacgtgggagcaacgaagaagatgtttacaagttagccatcattacggctgctcaagcattacaaaactaattgaccgacaacaaagacgccagcacagaaaaattgtgctggcgtctttgactttgcgaacagggcttttttcggtataatgacacacagataacaattagaatgaggcagaacatgttagaatttaaaacaactgatccagaacaaacaattgcgattgccaaacagttgggccaacaagtccaagccggtgatgtcttgttgttggatggtgatttaggcgctggtaaaacaacgtttacgaaaggcttggcagctggtctgggaattgaccgctatattaagagtccgacatttacgttaattcgtgagtatcaagacggtcggttaccactctatcatatggatgtgtatcgattggaagaaacgggcgccagtgatttaggcttagaagagtatttcgatggggacggggtttcggtggttgaatggagtcaatttattgctgaagaactaccgagcgattatttgacgattcattttaataaggatgttagcgatgatcaagttcggacgttagtacttgatccgcacggcgctcactacgaagcattggtgcgtactagttttgcagactagtgtaattgacattcggcccgcgcaagcagcagatgcgcgggcttatttatgctttctaaaggcggtcgctaaagaaacaccgtatgttgcgttaccagcggagttagccactttaacaccattatttactgaatttttgatagcaagtattcttgaatcgcaacaagatgtattattgcttgcttttgatcaacagcaaattgtcggggcaattcgtgtgaatagtccgacagaacaggggctaacacatatcagtgaagttagtatcgctgttttaaaagcgaagtggcatcgcggaattggctctgatttgatggcgcaccttttagcgtcggttcgagaaataggaaatccgcgacggcttgagttaacagtacaagcccgtaatcaccgtgcaattgcactttacaaacggtttggttttgtgaccgaagcacaattagcagccggattttatgcgccagaaacgggctatattccggttgtgcaaatgtgccaattaatgaatatggatgaggagatttaagatgcaacaacaacgaggacgcggaatttacttagccgtattaggatcaatattttgggggattcaagggccagtatcacagtggctattcactgacacggcaattaagccagaatggctaatgggggttaagatggggctttcaggcctatttctattaggttatgcgctcattaaacaaccgaacgatgtttttacagtgtggcggcaaccgcgggactttacgcggatgttattatttgcagtattagggttatcggccgttcagtatttttattttctaacgattcaagccagcaatgcaccaacgactacgattttacaacagctaggcaccatcatgatcatcttaattagcttggtgatttatcgtagagcacctagccgcgttgaactaattgcagtgactgtcgcattgttggggacgtggttgttagtgacaaaaggacaactgacgcatttggcgatttcacacgcggcattcggacttagtttatgccttggcttttccggcgctttaaacacattaattccggttaagttattccaaaaatatccaacattagtgattgtgggctgggcgatgttaatcggtggggtggtcttcacatttgttcatccattttgggtcggtgttccaccgttgaatgtggcaacaatcagtagtgtcttattcattgctttgtttgggaccgcgctcgccaatctttgtttcttggggagtttacggtatatcacaccgacaacggctggtttattgaatacctttgaaccattagctgcgactatcggtactgttttattcttgaaaacgagtttcaacacctgggaagtcgtgggtgggattctcgtgatcagtacggtctttatcttgagttttggtcaatctaagtcaaaataagttaacacgatgaaccgaattgtggtataattaacagcggaaacaaagctcgtacattagtcaaaacaaattaatgattatgatgaagttgttaatcttgtcgaagccctaatgacaatttagctttaatccaccattcgctaaaagagcggttagcctgtctgcatagacaagttaaccgctctttttttgttagccgattaatttggtggccgcttttagcggttcaacgccaaaatcgttggcttctttaatcagaatcttggcacaagcgatactatcagccagtgcattgtggtgattgtcaagtggaatcgctaggttatcacacaaggtgtttaacttatgattctcaaattgtggatacaaccgccgactcgtcttgagagtatccaacgctaaataatggggttctggaatgtcgtagtgttggagtgtacttttcaacacaccaatatcaaaattcgcgttgtgggcgaccactaacttgtttggcgtgaaaaatggtgcgatgtgcggccagacttgattgaacttgggcgcttgagccacatcggcttcatgaatgccatgaatttgcgtattgcgactgctaaaataagtttcaggtttaattaacgtataaaaactatcaacgatttgatcgttgcgcacaacaacaagggcaagtgagcaagcactatgctgttgaccgttggcggtttcaaaatccattgcgacaaaattcattattttgaacctcgctttttataaagtttgcttattttaagcgaataaatcttgcgtgtcaagttcgacggggcagtggtcggaaccaaaaatttccgtgtgaatcttggcatcgactaatttaggttggagatcattggaagtaatgaaataatcaatgcgccagccggcattattgtcgcgggcgtggaatcgataactccaccaagaataaatatcgggttgatcaggatagaaataacggaaggtatcggtgaagccgcgatttaagagggttgtcatttgccctcgttcttcatctgaaaagccggcgttatgatgattggtcttatcatttttcagatcaattggttcatgggcaacgtttaaatcaccgcagaaaatgacgggtttttgagtcgataaatcagcgatataagtttgaaaggcattctcccaacgcatgcgatagtctaatcgtttcaacttatcctgtgaattgggtgtgtagcaagtgattaaataaaaagtagggtattcaagtgtaatcacgcgtccttcttgatcgtgttcaggttggccgataccataagttgcagtgagcggtttatgcttagtgaagatggcagtaccggaatagccttttttttcagcgtaattaaagtattgatgataacctggtaaatctaattcaacttggccggcttgcatcttagtttcttgtagacagaaaaaatcggcatctagttgattaaaagtggtcataaagtttttttttaaaacggcgcgtaagccattaacgttccaagaaataaatttcattgtcgatccctcatttctaaactccattttaacggtctagtcaataatacgcaaaaaaagtgttggctgttcaattcaagccgtctttgttaaactaggagtagattattttttgaggggaacgacaattgtgacaagtcaagttgaagtatttttacaagcaaaccaagcaatcgagattcatcaagcagaaccattgagcttatacacctttaccaaaacaggtggaccggcagatttactcgcactccccaaatctgttgcagaagtgcggcaattagtggccagtgccaatgaactgacattacccatcacaattatcggtaatgctagtaatctaattgttcgtgacggtggcattaaaggcttagtcatcatcttaacggcgatgaatcagattaaagttgaaggtaacttggtgaccgcgcaagctggagcagggattattcaaacctctgaagcagcttatagcggtagtttgaccggcttagaatttgctgccggcattcctggtagtgttggcggtgcggtctttatgaacgccggcgcatatggtggcgaaattagtgatgtactgacccgcgttgatgttttaatgcgcgataatcaagtacagacgttaacggccgctgacttagacttcagttaccggcatagtttaattcaagataacggcagtattgtgttggttgcctattttgaaatggcaacgggtgcggcaccaacaattcgcgcccggatggatgaggtcaacactttgcgggctgccaaacagccgctagaatatccctcatgtgggagtgtctttaaacgaccagtcggtcattttgtcggaccgttgattcaaaaagcgggcttgcaagggcatcaaattgggggcgcacaagtttctaaaaaacatgccgggttcatcgtgaatattgatcacgcaacggcaacggattatttgacgttgatcgaatacattcaaaaaacgatctgggcgaagtttaatgtgcgcttagaaccagaagtccggattattgggcaacataagcaaggttaaatcaatgatgaaaagctatggtaaaagatgattttatcagggcttttttatcaggatgagcgttttaaaaagaaagggtgttgggatggcaattattgaagctgttattttgttaattacgttggtgattattgccaatatcatcgggcattatttgccaaatttaccggttagtttaattgagatcgggttgggattaatggtggcgttagtctttgccgtcaagattccactaaaaacagattggttcatgttggtgtttgttgcaccattattgtttaacgatggccgtcgttttcctaagaaggaactatgggcgttgcgcggaccaattattgggaatgcgattttcctcgtctttgcaacgacgttaattggcggcttggccattcattggttagtcccggcgttaccgctggctgcaagttttgcgttagcggcaatcttgtcgccaacggatccggtggcggtacaatcgatttcagaacaggccgatttaccgccccgggttttgcacttagtgagtggtgaaagtttaattaacgatgccagtggcttgattagctttaaatatgggattgctgccgctgttaccggctatttctcatggcaacaagccgcgggcgattttctgtatattagtattgttggcgcactagcggggatgattatcatgttaatcattcattttattcgcctatttatgctacaacaaggctttgaagatgtgatgttccatacgattttacagttggtgacaccgtttatcatctatctaattgttgaagatctattccacgcatccggtgtgattgcggtggtggtagctgggatcatcagtcattcatcacggaatatcttcctcgattttttaccggagttgaagttagtgaccgaacaaacttggtcaatcagtgtttacttattaaacgggattgtctttttaattttagggattgaattacctgtcgctatgcataataccgtgcataatccgctgattaatacgagtgaagaaattctcctcgtcttagcggtttggttgattctggtgattgtgcggggactctggacactagcttacttgctctacaccaaccagacgaatcccaaaacattccgcgaaaacattaaaattgcggtgctctctggactttctggggttcgtggagcgattacgatggccggggtattatcggtgccaactgttttagcggatggttcaccgtttcctcaacgcggcttaatgctctttattgcggccggcgtgattattgtcagtctggtgatggccgttgtcttaattcctaagctgacaaaagtcaaagcaccaatcgagatgcgagggatgcaacgagatcttgaagccgaagcagccgcagaagatgaagcagctgctgatttattggatgaaacaaacgctaagatttacatgtacaaagtagcagcgagcatggtcgaatcccaacggcatattgataataaccgggctgctttagatttattggcagagtatcagttgatgatccgccggttggagagtcaacaaagcgaagcaagcacaagtgacgaactaccaccgttaattgctgaagagttgattttgcgacaagtggcatttgacggagaacgtcagaagttagagttgttatgggctgaaaaggccattagtgctaaaagctatcggcatggtaaacgtaagttacggcaaaaacaagtaatgttatcggttattgggacgagttttaattggcatcatgtgcaactacaagtctatcgtgcttggtcaatcagcaaacgctttttgacgcatctctggccgcggcatatcaaatcaccaagtgaaaccgagtggcaattgactgaacgtgaaatggctaaggcgggaattaaacaattgtcgtatttcctaaaacagcctgaaaatcgccaacgtcattataatcgtcaggttatttatcaaattattgtgcggtatcggaatcagattgaaaacatgaaaaatggggggcggagtaagaccgctatctatgaacgtcaattacaaaaattaagaatcaaagcgctcacgagtgaacgagtggcgattcaagagttattggaacaacataaaatttcatggcaacttgcagatgaattacgcaaaaacattaactattccgaaaatgcactgattttagcacgaacggatactgaatagattcaaaaaagccccacgcactcattttaaattgagtgcgtggggctttttttgatggttagaataagtggcggcggcggtagtatttgtagctgcaataaccaccaattgcaaagccggcgctgattagtgaaatcgtcaaaccccaatagaaataaggtggccagtatttaagggtaacggtatggtgaccttttttcagcgggatggcgatgaagttcttcaagccgcgtttgattttaaccggatggccgtcaaccgttgcatgccaaccagcagcataggggacggttgtcatgaggacttggttttgttgaggaatggtgatcgttcctttgatggttgtgtttgagaaagtattcagtttcaatgcatgtgcacgaagttgctgcgttaggtgcgtcaatgcttgataattcaaactatataaattaatattttggagccaaatttcctttttagagaagctaaggtcaacggtttgttgttggccgattgcgttacttgtcaggtttaagacgacagtatcgcggaaagtatcgtattgttgtagcgtgtgaccgtttaatgagacctgaaccgcatttttttcgaggtttgagcctaatgtgaggtaataggggtcactcgttgtgggtgtgaaggtatagatgacgtgagctggattcttcggatcaacccggaggaaagtttcgttgagttttggtttttgtttagcattcttgtaagtgacagtattgaaaaattgaagtgtgaagagtggctgttctgtcgctgaattgactaagtctgccgcaatctggttctgttcaaggatgggataattggcaaccacatgatgtttaagcactttttcagaggccgcaaagcctaaatcaagtgcgttggggttttgataaattgcaatttgatctttttttttgagtaagttataacgtgctaagtccggcttattcgtactgagtggaattgttgcttgcccactagtattgttaaggtagtagcgataacctaataacgcatcggtgaacagggtctgattagtatcggcaacggcgccatcgccagctggttcgccaatgctgcccatgaatttcggatagctcagttcgagcatcgaattaaaatgagatccgccgaaataatcagcttgcatcgggtcattttttgtccgcataaaggttttgccaattcgttgaaacgcggttttatttggaattgcgctaatggctgattgtaaatgagctgtataatctgcgtaatctttttgtgagacatagctaatttgattaagactcattgtcgcgttggtgaccatctcaccaccgacgcatagaactaagagcaaaggataatagcgcttgagcggctttttcaggagtaaaagcaagcatgtcatcagtaagaaagcgatgcttaagttaatctgattaggacttagcgcggtgaagctcttgagatgtttggcagtataaccaaaagccgccatcaacattaaaaacggcaacaagagttgataccaactaaatcgaaggtgctggtggagccgttgaaccgcgagcacgattagccaaaagctaaccacatatgaaaagcggtaaggataccaaaccggaaattgcatgccgtgccataataaatcaaggggttcataacacattgaaacacctaagaaaatggtgactaataaggcaactaaccgttcttgccaggcaatcttgcgtgttccaaaatacaagatggcacaaatcaatacgagactgccgacgaatatattcggttcgccttttggcatttggtcgaagttaaaattgccaatcacaagtttagaaagcatcttaagcggattatattcgaacttccaatgaatcttttgaatggtgtactgccctttgctctgcgtcaattggaaaaaagttggcaataggagccaggctgagagtaaaccggccaagagtgagccactgatgaagcgggcagcgcgttgccatagatggcgccaagtttgccaataatgagcacaagcccacgcaaaataagcaatgacaaacaggcaaaccatatagcccatataatagttactcattaagagtgcggcaagactcaatggataaagccaaaagtgacggcctgtaaagagccggtcgatgcctaagacaactagtggaagccagacgagtgcatccaaccacataacgttaaactggttggcaattgcaaacccggataaggcgtagacaacactaagtgtcggtaaccaccagctatggagtagtttgttagattttaagtagtacgcaaagctaagaccactggcgcctgttttgaaaaggacaagcagccaaacaccaaaactcaaccaagttcctggtgtcaataggacgattagattgaatggactcatcaaatagtaagcccagaccccaagcatgtcgccccctaagcccttagcaaaggaataaaaaaaagtttcgggatggtgcaatagcgtacttctgaaaaaagcgtaaaaatcgatgtattgttggcctagatcaacagtcaggattgtttgccctccaaaagggaacacttgtcgaagtagtccgtagataaataaaatgccaaatggtagtaagaaactaaggcctaatgtataatgacgacgtgcaaaagcgtaaaatcgactcacggtaatcctccaattaataaaaaaatctaaaaattaggttgctagtccgtttttaactgagaaaagctgtaaaatataaccagttaatgactatgcttaagcataccataatctcgtttgaatttagagatttggcatagcttgtttaagataattttgctaaacttaaacaatacagcacaaaatcgctcaaaaggtcgcttggcgactttttgaagcatagagcggcgccatcttttactagagcggcgctaaataaggagtatctgaccgtctgtgaaaatcattaagagaaaaaacaaacaaaatcgtgaaaaatcactgattccattccgcttaaatttcctattattcgttgtcttcgcgttatttgccgcgttgattatgcaattgggacgcctgcaagtgatggagggcgctaattttcaagcgatggtcaacagtactgataagaaaatcgttacaggtaacgtgcctcgagggatgattctggattcaaagggccgtgtcttagttgggaatactgctaaaccggcgattacttatacgaagaatatgaatgtcttggcagacaaaatgtatgcagaggccaataagttaacccaatatttaacggtcccgacggataagttaactgaacgtgatcagattgactactacctcagtaaccccaagaatcttaaaaaatggaacgcaaaactgcctaaatctgcgaaggttgccagtgatggttctgagttgccagaaaagaaggtttatcaatcaacaatcgaattggttaaaaagtcgtttaaagggttaaacgagcaacaaaaacaagccgctgcgattttcaaaattatgagtggggcttatcaattatcgacagtttatattaaaaatacggatgtgactgataaggaaattgctgaaatcagtgaacatctaacgagtttgccagggattaatgtcagcaccgattgggaacgggcttatcctaatggcgattcaatgcgcagtattattgggcatgtttcaactgaagagcaagggttaccagaagatggcgtcaactccttgctagcacagggctattcgcgtaatgatcgcgttgggaccagttatttagaaaagcaatacgaaagtgtcttgcatggttctaagtcgcaatcacaagttgaagttggtgcgaataatcagattctctcaagtaatgtcttatttaaagggcaaaaagggagtaatttaaatttaacaattgaccaagcttatcaaacgcaagtggaagcggctttgaagaaagtctatgatcaggcaaaagcagcgggagccactcagtattctgatggtgcctatgccgtggcgatgaatccgaaaacaggtgctattttagcaatggctggcgaatccaacgatcgtaagtcaggtgaaattgccgatgatgcgctcggggtgattaatcacaccttcgtcatggggtctgctattaaaggggcgaccgttatggggggcttaatggatggtgtgattacgccaaccaataataccttaccggatacaccaatctatttaagaggaacgccggttaagaaatctgtttacccagttgggacgtttggatcattgaacgctgaatcagcgttggaagtttcttctaatatttacatgatgcaattagcgatgttagaagggcatgccaaatatgtacccaattcttcgttaacgatggattcagatatctttacgaagatgcgtggctacttcagtcaatttggcttaggacaaaagactgggattgatttgccaggtgaagccaccgggatcgaagggccaaccgtcaatgaatatggcgagccagccaatggttcattacttgatttatcttatggtaactacgatgcctacaccttaattcaattggcacaatacatttcaaccatcgcaaacggtggtcaacgaatgaaaccataccttgtggattcgattcaacaaactggtaacgatgggtcagctggccaagttggtaccaagaccacgccgacagtgcttagcacagttgatgcgcccgaaagttactttaatgtcgttaaaaaagggatgtacaacgttgtcaatgggaccaacgcttgggggacagcacacaccttgaaagatattaaaccaacgcttggcgctaaaaccgggacggcacaatcatttgcccgtgaagatccaaacgattcgacaagtaagcaagtcgaaaccgttacttctagtttggttggctttgctccatacgataatccgcaagtggcaatcgccattgtgttcccgaacttaaactctgataaagggcactacaatacgttactagcccgtgaaatgattacgagtttctataaattaaataacattactgaatgaaatattccaaaataaccttttcagataccataaaaaatggtatgatactaagagtctaagaattaaacagttttttagaaatttacttacagcttggaggctatatcaatgcgtgttcacattacaatggaatgtacagaatgtcacgaacgtagttacttatcaaacaaaaataaacgtaacaatccagatcgcttggaattaaagaaatattgcccacgcgaacgcaaagtaactttacaccgcgaaactaaataatagtgacgcacatcaaaagtcggggcgcttcgcgctcgggcttttttttattaaggaggcttttgaatgcggactaaaaagcaaattcggcaacaacaaattgcggcattacaaacgcttgcgcagacgcctgcgcttaaacatgcccaagaagcacaacttttggaattgttaatgacaaccgaggtgtttcaaaaggcaataatcatcggtgtcacgttgagtcagccaattgaaatggcgacccagccggtaattgatgccattcgtttggccggtaaagaagttgtagtgcccaagacattgccagagcgacaaatggctttttacccgttaacggcaaccactgaattaacaacgagttcctatggtgctttagaaccagtggttacagctggtagccaggtgttaatccctgatttaatgattgtgccgggactagcatttagtccagaaggttggcgggttggttttggtggcggttattatgatcgttatcttgccaaatatccaatgccaactgttgcactagcgcttaaaccacaacaacgaagtgctgattgggccattgatgaattcgatatccaactcgatcaggttcttcaggtctaaaggagaaaagatgactaattttaaagaacgttggcaagacgcaccgattgtggtgtatgccttgatgttactaacgattttgatgtttgcaatgatgtttttgaatccggttgtatggttgaacggctttacatcggttaacatgctaatgaatggccggattattgggtttatgatggcatctgtcaatcatggccggtttatgaatctcttcgtagatttggttattttgttttttgttggtggacaacttgaacgattattaggacactggcgcctattagctatctatatactgagcagtttggcgagtttgtttacaacgggcgctttttttggtctcgatacaccaaccgtgactgctggaacagctatcttagggctattcggtggcttcttgatgttaggtgatgcctttaaagaagaatccgtgctaggacaagtggcacgccagtattggctgtttttatttttaacaatcggattacaatttattgtcgatcacaatgcattgtacgcaatggtaggtggggtacttggcggctttttaagtagtatggcgctgggtgcacctaaagtgggtaagattgacccgctgaaccgtgtggtgagtgggttaatttatgttgcaacgatgattttatttggttttctgggtatgaatcattaatcaatttatgtataatgttaaaggtgaagttgatgagaactctatatgatgtacaacaacttttaaaacaatttggcgtttacgtccatcttggtaaacgactttgggatatcgagctcaccagtatcgaattacggcacgtttatgatgcggggttaatcgatggcaaagtgtatcgtgatgctaagatggttttagtgcgtgaacatcggttggagaaaaatgaagcgtttaatcacaatttattggaggagaagtttaaatgacagacaagaagttaatcggcgttgatttaggcgggacaactgctaaatttgcaattatgacaatggatggcgaaatccaacaacgctggagtatcgatacggatattttagatgaaggtagccacattacaccggatatcattgaatcgattaatcatcatttagatttatataacatgacacctgctgatttcatcgggattggtatgggcacacctggtagtgttaacagtaaagaagggaccgttattggtgcttacaacttaaactggaagacaacccaatacttacgtcgcgatatcgaagctggcacacacatgaagcttgcaattgataatgatgccaacgttgctgctttaggtgaacgttggaagggtgctggtgaaaaccaacccgatgttgcttttgtcacacttggcactggagttggcggcgggatcgttgctgatggccatttattacacggtgttgctggttctgcaggtgaattaggccacgtaacagttgaaccacatggttatgaatgtacgtgtggcaaacaaggttgtttagaaacttatgcttcagcaaccggtgttgtgcgcgttgcacgtgacatggctgaagaatacgctggtaattcaaaattaaagacaatgttggatgatggtgaagaaatcagctctaaattagtttttgacatggctaaagaatcagatgcattggctgttaaggttgttgatcgtgtttcttactaccttggtttagcattagctaacgttgggaacatgttgaatcccgcttacatcgttatcggtggtggtgtttcagctgctggggaatttttacgtaaacaagttgaagcttactttgaagaatttacattcccaaatgttaaaaatacgactaagattcgtttagcaaacttaggaaacgtagccggtgttatcggggctgcttcacttgcacttcaatttgatcaacaataatttgttataagggagtcttatcgatgcttgtattagggacaattaatgtatgggtagtaattaatattattctgatcgccattttactttggttcttgggcgattgggcatattatcaaattcaacgcaaacgcttaggcggcgaattaacggaagcggcgtttgaagaaacaatgcgcaaggcccaaattgtcgacttacgggataaaaaagattttgatgcaggccacattttaggcgcccgcaacttaccttatccaatgttgaaacaaaatatgggtgaactacggatggacttaccagtctacttatatgatgcaggcattacgctcagtatccgagcagcactgaagttaagaaaagctggtttcaccgacattaaatggttgaaaaagggttatgctggttggaccggcaaaacaaagcgtaaaaagaaattaaattaaaccaaaaaagcccaagagttactagcgaaaaaaactagtcaactgttgggctttttatagagtgcgcaggcagatggtcatactctgaggattagtggcataccgtaaatgagcggcagagccgatcgtttacggtatgtaactaaccgaaagagtatatctggcggcgcacgtttcaaaacagagtgcgtttaaagcggtttgactctgagcattagcatagtgttgttaatgaccgacaaagttggtcgtttgcaatacgaagctaatcccaagagtcagctttaaaaagcacgtttccacaaaaaaagtccgtcgccaatcaggcaacggacgcagtcttttcaaagcgcttagccttggtgagctgaatggctcttacggttagcacgtcgacgactttcttcaatttgattttctttttcttcgattggatcaacgacggtcttcttaaatgccaagagtgaaccggcaatcgcgccgactgttgaaacggttccgattacgaaaccttttagaaatttatgtttcataggtaaagcctcctcaagtctcaattcattcaagtacaactttattatcgcgtatttaagcgcgaatagctagtaaaatacgttaattaatgtggtgaaaatatggaaaaagaaaagctaatcgtcattgttggtccgacaggcgttggtaaaacagcgttaagtctacaactcgcacaacagttgcaaggtgagattatttccggggatgcgatgcaggtttatcgccagttagatatcggtacggccaaagtcacaccaaaagagcaggcgcttgcgccgcaccacttaattgatgtggcggatatcgatcaacgcttcactgcctttgactttcaacagcaaggacaacaactcgtcactgaaatcgtcggccggcaacacatgcccttggttgttggtggaacgggactttatttgcaggcgttactgtacgatatgaccctgggtagtgcgcaagatgcggaacagaattttacgattcgtcaaaaatggcaaacttttttggatcagcattctgaagaagctttgtggcagatgcttaatcaaattgatccgcaagcagccgctaaaattccgagtgcgaatccacggcgtgtggttcgcgcattagaggtttatgaaacaacgggaactttgttttcacaacaaaagccaaaagaattacgttatgatacgtttattattggattgaattgtgaccgtgcattattatacgagcgaatcaaccagcgggtggatcaaatgatcgatgctggacttttagaagaagcgcggttggcttatgcacatcgtgaaacgagtccgcaagccgtgcgggggattgggtataaagagttcttcccatactttgatagtgactgttcattagacgtggcaattgctcaagtaaaacaaaattcacggcactacgcaaaacgacaactaacgtggtttagaaaccagattccggtcaattggtataatctggttgaacaacctgaagccgatttggctcggattcaaaccgatttacaacaatggttacagcaataatagaaatggagtggttaaaaaatggattggcaagcaaacttagcaccagaattacaagctaaaatcgcagcagttgatacgcaaatcgcaccgcgtttacaagcactggatgaacaaatcatcaataatcaagcaaaggtgctcgaagcgtttcaagcagaaaatatttctgaatcgcatttaaacgggacaaccggttacggcaacgatgatcaaggacgcgataagttagaggccgtctatagtcacgttttcaaaactgaagatgcgcttgtgcggccgcaattggtttccggcacacacgcgattggaacggccttattggggatgttgcggcctggcgatgatcttttatatcttacgggcgaaccatatgatacgttgcaagaagtcatcgggatggccggtaacgggattggttcactaaaagaattccaaattggattcgattttgtgccattattagctgatggtgccgtggattttgaaacggcccggaccaaaattacagctaagacaaaagtggtcgctatccaacgttcacgtggctatgctgatcgcgatagtttcacggttgataaaatcaaggaaatgattgcctttgtcaaaaacattaaccctgaattgattgtctttgtcgataatgcttacggtgaattctctgaaacaacggaaccaacagaattcggggccgacgtaatggccggttctttaatcaaaaatgctggtggtgggattgcgcaaacgggtggttacatcgtcgggactgaaaaattaatcgaaatgattggttatcgcctgactgtgccaggtgttggtgccagtgaaggcgccacacaaggcaatctgcaattgatgtttgaaggtttcttcttagcaccaagtgtgactggtaatgcgattaaaggggctgtttttgaagcagcgcttttggaacaaatgggcttgagtgtctcacctaaatgggatgcccctagaacagacttgattcaaacggtgaacttcggtaatccggatgatatggttaagttcgctggttgtgttcaagcgcaatcaccaatcgattcatttgtgacccccattccaagtgattttgccggttacgaagatcaaatcgtaatggctgccgggacctttatccaaggtgccagcatcgaattttcagcagacggcccattgcgcgccccatatacactttacttacaaggtgggttaacttacgcgcacgttaaactcgcgattagtcgggcagtccaaacaaccttctttgaaaaataaatgccaagcggtcaatcaaattcgcgtttgattgaccgctttttttgtgcgttaagcatggtatgataagggtgcaacgaatcgtagcggtcggttttaagagatgctttggattgttgctagtataaatgtgtcattctcgctacggtaagtcttggaggtggttagatgttaattggtcaacaattaaaacaatttcgtttggatgcgggctactctcaacagacactcgcagagcagattaatgtgtcacgacaagtcatttctaaatgggagacggataaaagtgcaccagacttgaatacattggttgttcttgccaaattgtataatgtaagtttgaatactttgctcggggttgaaacggtcactaaaccgaattcattctttgggcggttgcggcaacattggcatttggcagaaagcgaaaatacaaaaccgctgtccgatttaggacggattatgcaacaacccgaacaacactatgtggatttagcacaacagttcagtgtcactttgacggatgtaactgttactagtgatggccaaacaatgccagcgaattggcggcaagcacggagtccttatttaattgtattagaaccgcgccaaatttttttaaagcagacagatgttttaaaagtcatgcccgcaaaagttgttaagcaacttgcgacaacggaaattcgaacaattcattatgcggtcatgcagactgctggaccatcaaccattggcgggttacaaggtatcgggcacgcttatcgggccatcgtgacggttgatacaaagcaatccgtagcaccatactatattaccaaccaggattttcttcagttggcaaaagttctgaaagcttatgcacaacaggaacacgttcaatttgatgatcagatggctttgctgccttattttatgacgcatgacacaactgactgctttaattatttagaggtacattacagcgaattagcggaaaaagttggggttccagcagaaagcgcaggacaggcggtttatcgatggtagatgaaacagcaaaaaacaactttgaaacggcgacagatggggttcaggcttatcacaattattttggcacgccaacgcacgatgatcgtatttggtttgaactcttaacagttggggtcttccaagtggggttgagctggaaagtagctgcaagtaaaataccagttctgcgacaacaaatggtggggatggtgattgatcaagtcgcacaatttgatgaaatggatgttgaacgcctgcaaaaagaaccagatatgattcgtaatacgcgtaagattcgggcaacgattcaaaatgcgcgggcaattcaagccatccaaactgaatatggcagtttttcagcgtatttgtgggcgtttgttgatggtcagccgcaattgcttgattcacaaatggctggcgtgtccgataaatcagcgccgatcagtacgcaacttgcgaaagagttaaagaagcgccagtttaaatttgttggaccggtggtaacgcatttgtttatgcttgcaggtggtttgattcaaatcatcgatgaagactaatgcctaaaaggtaaaccaaattggtttacctttttttgttggctgatgttagaaaatctgacatcaaatgttgaccgtttgaaaggcgactggtaagataaaacgcaagtgaggtgaaatggatggctgaaaaacacttaaggcgcaacttagcagttttaccaattggtacggtaatgaaattgacgggacaaactgcgcgtcaaattcgttattatgaagcacaggcgcttgtttttcctgaacggacaacgggccatcaacggttgttttcgttgaacgatgttgatcgtttgttggaaatcaaggattacctagctgaaggcaccacgatggcacagattcgccagatttatcagaagaaggcggatcggcagcgtgataaacaattatcagacgaaaaagcgcggcggttattggccaacgaattattatcggtcggcggcttagttggacaacagtcaaccatttcacaatcatctaaattatattaaggggcgacggattaatggcacgtaaagtattgacagcagaagcaatcaagcaattagtggatcaagaaaacgttaagttcttacgtttaatgtttacggatatcaacgggattatcaagaatgtggaagtaccaattagtcaattagataaagttttaagtaacaaaatgatgtttgacggttcttcaatcgacggttttgtccggattgaagaaagtgatatgtatttgcggcctgatttaagtacatggctcattttcccatgggaagcggaacatggaaaagtcgcgcggttaatctgttctgtctataccgcagatggagaaccattcttaggcgatccacggaataatttgaagaaattagtgcgcgaaatgcaagataaagggttcaaagactttaacattggaccggaaccagaatttttcctctttaaattagatgaatacggcaaaccaacgttgaaactcaacgaccaaggcggctactttgattttgcccccgttgatttaggcgaaaactgtcggcgtgatattgttttggaacttgaaaagatgggctttgaagttgaagccagtcatcacgaagtcgcacccggacaacacgaaatcgattttaaatacgctgatgcagtcgatgcagcggataacatccaaacctttaaattagtcgttaaaacaatcgctcggaaacatggattacatgcaaccttcatgccaaaaccattacacggtgtcaacggctctgggatgcacattaatatgtcactctttaatcaagatggtacgaatgccttctacgatgaaaaaggtacagaacaactttcaaaaacggcttatcatttcttagctggcttattgcaacacgcacgcgccatcacggcaatcaacaacccaacagttaactcttacaaacgattagtccctggttttgaggcaccggtttatgttgcatggtctggtcataaccggtcaccattgattcgggtcccacaatcacgcgggttatcaacgcgtctcgaactacggagtgttgatccaagtgccaatccttatttagcaatcgggtcgattttggcagccggtttatctggcttagatcaagggctcttgcctgatgctggtgtggatcgcaacatctatagcatggacgaaacagaacggaaggaaaatcacatcactgacctaccatccacattgcacaatgcattgaaggaactagccaaggatgagattatcaaagattcaatggggccttatctctaccagagcttcatggattctaaatcattggaatgggcagcttatcgtcaacaagtttccgaatgggaacgcgaacaatatttggaactctattagtcgcaatttacgccatgtttttgtacaattaaactttagaaatagaaagttggtagagtatgaaaacattggtgattatcagccatcccgagattgagacgtcgatggtccaaaactttttaaaagcgagtgcagcaccactggaagccatcacttggcaccacttagatgcgcttgagacgttagatgtggctgctgaacaagcattattacgcaaccatgagcggattatttttcaatttccgctctattggtatgctgctccagcgagcttaaaaatgtggttggacaccgttttaacggggcaatttgcctttaatggccgccaaccattagccgggaaaacactaggggttgtcgtttcaactggtacggcggctaaacattttcaagctggcggcagtgaacaagcaacgctgtctgaaattttgcgcccatatgaattggtggctcgtaagctagggatgacctatttaccaccacttgcgattcatcaattgggttattggcaagaaactgataaacaatgcttggtcatcgattatcaacggtatttgacgcaatccgagttcaattttgatcagcaattagcgtggtttgaagcgatgctgactaaaaaggctgctgaagccacatcgcctgaagcgcaacaacgtttaatgcttttaagcgaacaattcgccgacaaacgatcggaattaaccgatttgaattggcaagtccaactgattcgcgaagaagagggggaaggctaatggattggttaacagaacaaattcaactacaaaaagaacaagccacaacgtatgaagagcaagctttttatacggcgcttcaacaaacgagtgatgaactagcattacggattgaacaacgccaaggtgaacttgatggtcgaatctggaatgcaacgaattggtaaactaatacaaaataaaaaacgccgcgacgaaagtcggggcgttttttgtgtaattcgattaatagcgtttgattaatgtatcgaaagcatcaacgattgcttggaagaaaccaagtgtatctgggtttgtgatttcttgattgtcatctaataagttcatgacattgccgatataagcttctggttgttgaaccgttggcatgttcaagaaaacaagtgattgacgtaagtggtggttagcaccgaaaccactgattgcaccaggtgaaacgctgacgatttcagctggtttgttatcccagatgcttgcaccataaggacgtgaaccaacgtctaaagcatttttcaatacggctggtactgaacggttgtattctggtgtgacgaataaaacggcgtccattgtcttcattttatttctgaaagttgtgtaagcttctggtacttgatctaaatcatcataatcttggttgtacaatggtaagtcaccaatttcaacaatttctagattataatctgatgggaataatggcatcaatgatttagcaactgatttgctaaatgaatctttccgtaaactaccaattaaaactgcgatattttttgtcatagtgaaacctccaattgttttacttattattagtaagtaactttagtatagcacgttcccctgaaaaggcaaccacttttacttactaatttaagcatagcgaattggtgaagcttttagcaaacaatatggtcggccattgattggcattggcaagctataaatcgtataatagcagtaagtagaacaaagatgggaaatgaataatggaaattaaatggcacgtcaatcaaccacaatctgttaaacaattcttgctagcaagtggcatcagtcaacgattgtacgccaaaattaaggcgttaggccaaccgattctagtaaacggacaaaaaagtgcgcctagtgatcaggtacaatgcggcgatgtggtcacattgcagttaccagctgaaccggccgatgaatcagttgctgttagtcacgaaccaatcactatttgttatgagaacgagtattggttggcggtcaataaaccagctggcttggcaacgattccgggtcccactaatcaaacggatactttgttgaatcgcattaagggttactggcaagcgcagggtgcaacagatttagtaccgcatatcattacgcgcttggattttgatacaagtggaattgttttagtcggcaaacaccaaattgcacaaagtctattgcaaccgcagattgaacagcatcaattacaaaaattctatttagcagttgtttcaggaacgggtttaccagcatcaggggatattcgtgaaccgattggacaaatcgaccatcaaccgcggcgtgcggtgttggcggatggtcagtcagcttggacgagttattggcacttgggtgcatcgggtcagttgacggcggttaaagttcagattcatactgggcggacgcatcagattcgggttcacttcagcgcgttaggctatccattggtgggtgatcagctctatgatgggccgcttgatttagggataatgcgacaagcattgcacgcgtatcgactgcaatttcaagatccattcagtcaacaatcaatctcgattacagcaccgattgcagccgatatccaagcgattctacctacagaacgattaccaattgattgattcaaaggaagatgacaaatgaaaaaatggcaatggttactaatttgtatcttgtgtttcggcattggtggggttatcggtcatgtagcgactggtccaacaacggtgccatcgattattcagccaacttcggccaccgcaaaccagcccgttattttcgtaccggggagtaatggaacagttgaagggtttaatggcacctttgctaaattgaaccgtcaagccacacgccatgttttaaaagtaacggtattaaaaaatggtcacttgaaaaccagtggtcgctttgatcaaaaaacacaacaccccgtgattgtggttgcgtttgaaaacaatgcagatggtgatgagaacgtctttaaacaatccgaatggtttaaattggcagcaggtaaattagctaaacaataccactttacgcattttggtggggttggttattccaacggtgggcttgtattaacgcggtatgctgagcgtagtggaagtggaccgaagattacgcgattactgacgttgggaacgccatataatggcatgtcggagcacatcactcaggaaacaccgatgttagctgatttaaagagccgccggcaacatttatccaaagacttagtggtctattcagtcggcggcacaattaacgataagaatgatgggattgtcccagcagcgagtgttgcggctggtcggctcatttttcaaaagcaagttgctgattatatgacaatttcggtgagccagcaccatgcagcccatactgaattgccggataatccaaccgtcatttcactgattcaacaattgatgtttaaataaaaaaaggtgtgtcgcagcaagttgagctgtgacacacctttttaatactattgatcgattgttttcaagagattccgcgtgatgagcattcccatgatgaagattaaaatttctgttaatgggacactcacccaaacaccggttaatccgaagaggctagaaagaaccaagacgctcgcaatcaaaacgatgtagccccgcatgatggccacgaaaaatgacaatcgaggttgcgcaatggcggtcatgaataagttattgacgatgttcatgcttgagaagaaaaaactaatgaaaatcaagggaatgccagcagacgcgtagcgaatcagttgttggttgtgttcatggttaaaaatttcgatgatcggtaatttaagaccaatcaaaacgagatataatcctaccgcaatcccgagtgcggaaagcaaaccgattttgagactcgttttgacattatcccaatgatgtttcccaaattcgcgactaacgattggctgaaccccgactgcaacaccgttgaatagggatagaccaactagtaagatgttggcgataatgccgtaagcggcgacggcatagttattactgagatggagaataacgatgttaaagacgaaaatgctgaccccagtactcatttcagttaagaaagatggaaacccgagttgaattgctttgaacgtcggttcaaaacgtaaggttaagtgctgcaaagttagtaaccgttgtgggtgatgccggtgttgtgtcaaaatcagtaggctaacgattggcgaacaaatcgtggccatcgcagcacccatcatgcccatgtgtagggggaacattaagaggtaatcgaagataatgacgaataagctttgtgaaagtgtcgcaatcattgtcaaatgtggattactatcgttacgtacgaaacttaagactaagttattgatgataaataagggactgccaattaaaataattcgtaaataggtcaagcttggggcgagcgtttcatgattggcacccagtaagtggagtagtgggtgaataaaaattaagccgagcgccatgatgatgaggcctaataaaatcccaaaagaaagaacttgagtgaaaatcgagcgactcttttcgggatgcttgctcttgttaattgagaaaatcgtggcgcccccaatcccgagcatcagacctaaaccgttaaataagttaaaaatgggcagatcaatattcaaagcggccaagccaattggtccgactgcgtaagcgataaaatatgtgtccgctaaaatatagatggataagcctaacgagctgaaaacgtcacggatgatgtagcccgttaattcttttttgatatgtggtgagttttccaaaataacactcctattcgattggtagtggggtcgccattaataacgcaataaatgattggattggtgctggtaaattcttccgggcgacaaggtagaattggcgttgatattgttgggacaatggtcgatagggaatttctgggtaatcaagtaaggctgcgctagaaactaatgattggccgataccctgtcttaatagttggataatcatcgcattgcttttgatggtcatcacgttttcgagtggtaaattattttcttttacgtaattcatcgtgtagtgatagacgccagaaccctgttcacgaagtaaccaaggttcattcgggcgacctgctaggaccagttgatcggtctgtagtggcgtccgaatcaagtctttttcggttaatggtttttcaatgaaaccaaagtctagtttgtgctgcgtcaattcttgaacaatctgcgatgagttgagtgtactgatatctaaggcgagtgtttcaagggctggccgatgcgctttaagcagggttggcaataagtaggttgcagtggtgtgcgaggcgccaattcggcacggtgtttttggctggccatcttgatgatggagtgcgtgcaaatcttggtcccataaatcaagaagttgttgtgcttgttggtagaagagatcagcactcttagtcggcgtcatctgctggcgcccattgcgttcaaatagtgtgacccccagcgcatcttccaattgtttaatttgcacagaaacggtcggctgcgatagaaaaagcagttgcgcagccgttgtaaaattcttggtttcataaacggttttaaaagttgttaaaattttaaacatatcatcacttctattcgttatcttaataaaaactattataaagatttattttattaattgaaagagtttcggtatagtttaagataacaagtgagaaggagtaaagcaatggacaatataacaaaaaaaatacctggctttgcgttatcgttagcgattgcgattgccagttattacatcgctaaattatggttaccaatgttaggcggcgcaacgattgcgctttttgtcggcatcgtacttggcaatacttggttgcaacaaccggtattagcagccggaactaagttttccgagaaaaaattattggaatattcagtcatgttactgggtgcgacaattacattccaaagtattcaacaaatcggctggcatggtgtgctgtttaccgtgttacaaatgagttgtacgattggatttgccatctggtttggccgccggttgcaatttagcgaaggtacctatttattgatggccggtgggaatgccgtttgtggctcgagtgcgattggggcaattgcgcccgtcatcgatgccgataacgaagataccggcattgcgattacattggtaaatctaatggggaccatcttgatgttactcttgccagttattggaacgttgatgtggggacataataatgaactccgtggcgtgttaattggtggaacagtgcagtcagttggtcaagtggttgccagtgcgacgatgattaaccaaggaacggttgtcacagcgaccttattcaaaattttacggatcatctgtttggtttttgttgtcagcggttttggttacttacatcaaaagaaacaaagtaaagtcagtgatacaaaactgagcgaacaattattagcgaagaagagtagcttagtgccatggtacgtgattggcttcctattattctgtgtcttaaatagcttacgggtttttccaagccaatttggtacactgtgccatttcttgagtacatggtgtgaaacaacggcgttagcagccattgggttacgcttgaacttaaaggcactcttcagccaaggtaaacgtttattagcatatgccggcggattagtgaccgtacaggtagtcctcgcgattttattaattacactattattctagggcgtgtcagcagctaggatgtttctaggaatattgaattattaaaaaatctgccatcaacaattttgttgatggcagatttttttgttattaagcttggtaagtgccgacttgaacggcttgttttaaagtggctggtgtgtgatgtgacttggcgaaaaattcgcttaaatcacgtccggctgttaaacctttaaaatgtttgccgccttgccaaggggcgattgcggaaaggtcataaacgacgccatcaacggcaacgtatgcgggttgaccatcttgaccgttatattgagcgagtgtttcttttgtaaagactttatctgtcatgattaaaaatctccttcgaattgtgaatgggttaccaataatatagcgctagatgcagaagttggcaacgattaagttgtgcactttgaaaatgaataatgttgaggctagcgaattagagaattattcgtgaccttaaatactgttcttcaaataataatttgttaaaataatcataattgggggggatgaaaatggacaataaaaaagactggttgatgcgacaagttgattcttttgcggaaggaatgggttatttgttatcgaaacaaagtggtaattcacagtcggaggttgtctttccacaagaaaatgctaaaaaattgccttttcaaagggaattggcaagtttaattgctgccaacgatactagaggggccgcccaacgattattaaaattacaatacgcaatgcctgaagaacaatttctacagttaggtacatggttattattagaaatgaagcaggacagttttcctaatcctttaacccgtgaagcgctgacagacgttttaaatacgattaattaaataattgaacgaaaaaaccaccctaataaataatagggtggttttatttaatattgatggacccgaccagattcgaactggcgacctcctacatgcgaagcaggcgctctcccaactgagctacgggcccaaacgcttacaaaaatattttagcacttttagctaaaatagcaaggcgaattagtgacgggcagatgttctgaggttatttgcttttttgccacctttaatcgtgcgggttttgaagtgggcttgttggctatcaggaacgaacttgaagtgttgcattttcccggcatatggttggccactgaggcgaatcttcaaccaatcttgcatggcttcaatcattccagtcagtttttcggcttgttcagaatttgcttgtttttggacttcggttgtaacatcgttagtgagataagccaataatttttgatgataggcaattagttcttctgtgagtggcgcttggttatattgattgaaaagtttttgaacaaaacgcattgcatctttagcgttttgtggttggtaaaagcgatcttgatcagacatagaatttccctctttcttcagagtagtataacgaataatagtgctcgtcacaaccgtgtgctttggtataatagagaaatactagtttttcggaggtcagcaatgtttaaacgtaaaagtgattggttcttagtggctgcactggtgatgatggcgatcttattttacagttcttcaatgacgtatcatgaacaaacatcggtgcccactttggaacgatttctcaagaatgaaccacttaaggcttggttaagtcaattttcgttccattatgcaggcagtgaacagagtgtaaaagcatctgggtatttcaaatttgtggagtttttcgtgcgaaaaggcgcccattttgggacgtatttcttattggcggcttttagttatttagggctacggccacgcgtaaccggtggttttttagcagttatctttagttggctggcagcaaccgggtatgcggccacggacgaatttcaccaaatgttgactggtgatcggacgccactttttcaagatgtgatgttggacagtgttggcgcattaacggggattgtgattgtttgcgcactacagtggatttttacacaaaaaaagagacgatagcccgactatcattgcttttagcatggtaatttgctatcatagaaaacgacttagtaccagaattctataatcgaaaagaggagttagatatgtcaggacattcaaaatggcataatattcagggtcgtaaaaacgcacaagatgcaaaacgcggcaagattttccaaaaactatcccgtgagcttttcatggctgcgagaagtggcggtcctgacccaagttctaacgccgcattacgtttaattatggataaagcacgttcagctaacatgcctaaagataatatcaaacgggcaattgataaagctgacggtagcgatggcgcgaactacgatgaaattacttatgaaggctatgcaccaggtggtgttgccgttttagtacacgctttaactgacaataagaaccggacaagttcagacgttcgtgttgcatttactcgtaatggcgggacaatgggtgcttctggctcagttgcttacatgtttgatcgtcgtggttacattgcgattgcacgtgaaggcttagatgttgatgaagatcaaatgtttgaagacattctagaagctggcgcggatgatttacaaactgaagaagacgtgtttgaaatttacacagatcctaaggaattagcaaatgtccgtgatattcttgaaaagaaatacacattggcaaatgctgaattaacaatgattccacaaaatacaacaccggttgatcctgaaaaagcagaacaattccaacgtttaattgatgctttggaagacaacgatgatgttcaagaagtttatacagctggcgaactaccagaagaagactaatttgtttgataagtgcgttgcaagtaattgcaacgcactttttttgtgcagaaaattatccggttatttgcgtatctttggttagtcaggaaggagggacgagatgaccgaagtattaacaacccttttgcaaaagtgcgcaacggaaaaagcgcaggatctttattttcgaccactatcgacgggttgggcaattattgaacgcttagcgacaggactaaagccgttacaaaaagttactctgtcagaaggcaatcaatggctcaatcaaatgaagtatcaagcggggatggatatcagtgaaactcggcgtccacagaccggccgttcagcgatcgaggtggcaggcgaattgatttatttacggttggcaaccgtgggggattttttgaatcgggaaagtttagttgttcgtttcatttatcccattgggcagacttatcattgcgacgactcgcagattttaagtcgtttaatgcagttaattcagcaaccaggattattgctatttgccggtccaactggttcagggaagacaacaagtttgtactatcttgcggaacaagtcatgcaagataagatggtggttgcgattgaagatccgatagagattcaacagccagcgttcttacagttacaggtgaatgaagccgcagggttaacctatgcagcattgttgaaaatcagtttgcgattacggcctgataccttaattattggtgagattcgcgacttacagacggcccaacacgcggtttctgcggcgttgagcggtcacttggtactaagtacgattcacgcgcgaagtacaacgggggtgatggaccgtctattagatcttggaattagccactcacaattaaccgcttgtttagcgggtgttgcctatcaatcactagtggtcgaaggccacaatgtagcggcccactatgagttagcaactgcacaacagttggaggaggctgttcatgaagactaaaaccactgttcaattcaatactgaatttatgttgctgttagggcgcttactgcaaaatggtttttctttacaacaagcacttgagttcatgccgattgtttttccgacacaaaagcagtggctgcatcaggtgcaaactgggttagaagcaggaaaacgactagcaccaagcttagcggcggtttcgtttccaacacaccttgttgcacagattgaattgactgagttgcagggaaacttaggcgagtgtttgttacatcttggccaattacagcgaattcaacagaaacggcgtagagagttagttggcgtaattgcctatccctgttttctactcctttttctcggggcgttgattgggatgatgcagatttatctttttccggaaatcgcgcagtttaacccaacaacttcggcgacatcaccattacaactattttttagagtgatggggacattcgttattatggctggtggtctgattagtgtgtatttattccgttggcatcggcgaccgctattacaacgattggcggcggcatttagatggcccttcatcggtaaaacgttgcaggcttactatcagtattgcttattatttgatttagcgacttgcctgaataacggcttaaacttggccgaaatgcatcagcttacacatcgtttggcgaaaacatcgtggcttgtacaattaatgcaacaacttgaaacggctgtccaaaaggggggcacgctattagcgaacttagcggatggcgttttttatccacctgaactgcaattagtgctcgctaagggaagtccgttacaacagatggccaaggaggttgatctgcttgcagtcattaaatacgatgaactgcaacggcaattgaaacagaaggtgaattggctacaaccgctcttgtttatcctaattgggatcatcattatttgtacctatctcagtattttattaccgctatatcatacaatggagggaatttcatgaagaagaaaagaaatgcatttacattgatcgaaatggtcgttgtgctagctgtgatagcaatgttagtcttgttaattgcacctaatttaatgcatcagaaagagacagctgagcaaaaaacggatacggctctagtggcaacgattcaaacacaagttgaattagctgaggatgacggtaaaacggtgtcgagtctagccgatttagcatcaggtgaaaaatatttaaccaataatcaggttaaacaagctgaaaaacgcggcataacaattaaggataataaagttgttcaaaatacaaaataaggcgttcactttaatcgagagctgtcttgttttgttcattgttggagtagtcagtttatttgcgttgcaacatattcgagattatcgtgcacggcaggcggagcgtttattttttgaacaatttgaagcgtcttggcatgcgactcgcgaatatgtcgctgttgagccgcataatgtgcacttatcttgggatcaaaccaaccacacgttgcattacacaagtgcggatccacaataccaaagtatggatatcccgattccagaaacattgatgtgcgtcgatccagaaacatggtttaggattcaatttaatcatgactcagctgctagaccgcggtcattgatttgtcggtctaaaattgatgggcaccgttatgaatatcgggtccagatgatgtgggggatgttacatgttaagaagtagaccggcatttctattaatagaacaaatcgtggcgttaagtcttctcctgatgggaggcttgaccttgacaatgagtctacggcagtttaaagcacatcaagttcaacggcggtgtgctactacagaatatgctgtaatggcaatggctgccaatcgattggcaaatgagcagccgccacaagcacaatggcagttgcaacgggaaacataccaagtcgtcaccaaaaaacaggccatttatgtcacaaataaagcgggtgagcgagttgcacttcaatggtattgttactaaacgctctggatttacactgattgaaatggttgtagctctcgttattctgatattgagcagtcaattaatattggcaaccactaaaacactaacgcacacaacgcaattaacccagatggaacgtcagaatattaattggcacattagtatgattgaacttgatcgttttctggatgacgctcaatttatttcaattgaacaggcgaattatgaacagcaattaaccgtcgctaaagattcgaaacgacgctataccttaacgaaaactaagaaggaactggtggtttcgagtacgaagaatggttatatgcctctgtttgatggggtctcgcggttaaaaatggtgtatcatgaaccttttttagaactcgaagcgcgcttaagcgatgggacagcctatcaacatgaatgttttttggaggcgcaacatgacacgaaaaatacagattaaacgctctgcagtcgcgctcttgaatgcagttttgatgttgagcttggtgacaagtgcgttgttgattgtgacccacagttaccaacagcaacaacagagttacgtcagtttgactaactattaccaaacgcaaatcttgcttaaattaacaaataaagcgcggcaaactcagtcaattcaaggtataaagactaacatcggtaagagtcgtatcgaccagcaacacaagttaatcatcattgagttaaacaatggttatcgaaaacagtttccagatcagaatgaaacagatcaaggataaattttctatttgataaagcgcttactatgatttataattctaggtatacccacctgtattacttgctttgccgttagaataccgatagaatataacaggaatctaatgaatagaggtggctattttgcctaagagtgctgtagaaacgttgtttgatcaactcgatcaaacaacacaattaattgaaaagaatttagaaacaacctatttggatgcactcaccgagaccattgctaatattgcagatggtggccgcgtaaaggttgaagacggcttaccagatgctgccactgttgcacaactagaaccgctttatgcggcggttaatctcaaccaatttgaagcagaagaaattcgccaagcattacagttggcaacgctcaagggtttgcgtcaagttaaagtggaaccaaacaagcaaatgacaccagatgcgatcggctatcttgtagcttatttggcagaggtttttggtggtgctgaccaaatcaagacaattttggacccagttgttggaacggggaacttattggcaaccgtaatcaatcatatccaaaaactaacggggaataccgtgcaaggttttggggttgataatgatgatagtttgttggaaattgcgggcatcagtagtgaattgcagaagcattcaacaacctttttccatcaggatgcgattgaaccgctactggttaaaccagttgatatcgccgttgcggatctaccaattggtttttatccattagatgaacgggcggctgattttgaaacccacgctgccagtggtcattcatatgcacatcacttgttgattgaacaaacgatgcattatgtgaaagaaggcggctatggctttttcctagtaccaaatgtgattttggaaacggatgaagctaagcaactgattaaatgggtgacaaaacatgtctatttgcaaggcttattgagtttaccagcaaacttgtttaagactaaggaaggtcaaaaagcaattttagtccttcaaaaacaaggtgccggggctaaacaagtggaccaaattttattaggtgaatttccaaattctaacgatcaaaaggcgtttgcaacgtatctacagaagatccggacttggcataaagataatttacaataatcgaatagaaaaggtgattagatgtcaaaagtattagcaattaacgctggtagttctacccttaaatggaagttatttatcatgcctgaagaacaagttgtcgcacaagggatggttgatcgtttaggattatccgattcagtctttaccgttaaatacggggatggtcaaaaattctcaatgacccaggatattaagacgcaagatgttgcggttgatttgttattgaagaagttaatcgaatttaaaatcatcaatgaatatagtgaaattagtgggattggtcatcgggtcgttgccggtggggaagactttaagtcatccgcattaattgatgaagcgtcattaaaacggattgaagaattgtcagaatacgcaccattacacaatcctgctgaagcaggtgttatccgtgctttccgcaagattttacatgatgtaccacaggttgctgtttttgatacatctttccatacaacgatgcctgaagaaaattatctttacagtttgccgttggaatattatcacaagtatggagcacgaaaatacggtgcccacgggactagtcatcggtatgtttcccaccgtgctgctgaaatgttaggcaaaccattggaagaattaaagatgattaccatgcatcttggtagtggtgtttcagtgactgctattaaagacggtaaatcgttggatacatccatgggctttacaccacttgcaggggtgacaatgagtacgcgttcaggggacattgacgcatcactcgttgcatttttaatggaaaaattaaacattaaagatccagcagaaatgatcgatattttgaatactaaatcaggtatttatgggatttctggattatctcctgatatgcgcgatcttgaaaaaacgcgtgaagaacgtccagaatcacaattggcaattgatatcttcgtcaatcgtttaatcaagtatgttggttcatacgttgccattatgggtggtcttgatgtcctagtgattacagccggaatgggtgaaggtgacatcttaatgcgccaacgcatcgccgatcgcttgagtttctttggcgttaaagttgatccagaacgcaataacgtgatggctcaagaacgcgtcatcagcgctgacgattctcgcgttaaagtattattagtaccaactaatgaagaagtaatgattgccagagacgttgttgaaattggccacgtctaaggcatcagtgaaaatgaccagcgcatggctggtcattttttagtggagggaatgggaatatgacaggttttacattattttatggcttattggcaattgccttgctcattatctggctgattgttgaaacgaaaatggtttggcgtgcaaaacggaatcgactatggacgatttttttatgttgtgctggaatcctcttactaggtttaacgttagtgatgggcagaacgctcagcgatcaaatcacaggtatcggctctgttgtaattttaattgtgattgctttttggcctcgtggtttaaccaaaacaagtttgattgcaaacttaaatactattcatcaatttgcagcgatttctaagattgaattactaacacaaggtgacttagtcgaagcttgtttttatgtcggtgaaattcggattgccaagttgcgctttaaaacgacggtagaaaaattacaaacctttttaaaagaccggtttcctaagaaacgcttagtggtgaaatagggttaaagtctttcatattactggctgatatgctaaactagtatttgcatatcggggccgttacggattcgacatgtgtaggtgagcgtgagttgcacttcgtaggttacgtctacgttaacaacgttacagttaattataactgcaaacaataacaattcttacgctgtagctgcctaaacaccagcatagcgtgatccgcctgacttcacccaagggttagatccgggtctcaaattaattgggttacgttaaacgctgccgtttgaggtgtttaaaagagatttgcaaactagctagttcatccgagcttctgtcggacggcgttttggactagcgaactcctaaatcgttcgactatgagtgtagagattgacgtggcaatgcgcatggacgcgggttcaacccccgccggctccattagataacaaggtgttaagcagaattaggcgcttaacaaaaggcgattaacactaccgtaacggtgttaatcgccttttttgtttgcaaaaaaataacagccacacgtgtgactgttacattaattgcttatgcccaacggtttgtttttgttggtaagagcattaggatatagaaccaaattgtcccgataagcggtatgaattcaatgagtacccaccagcctgagcggtctgtatcgtgaagtcggcgcattttaacggataaagttgcaatccaaacaatgaagacgacgatgttacgacccattgagatgcctaaatccccaatattatagatttctgaaattggatggccggttattgtttgaataataccgatgataataccacctagaatgtagttaatgatgattggccaccagaaatcaggtcggtttgaagtgcctgagaaatcaaaaatccgggaccaaaaactttgatatgatttaaccatgatgtaaaacccccttctccttatcagcttttcgcatcgtcagttctggacgagatgagaagttatgataaatttaataacttcctaccaaagatattatgacatacttaaacgagttttttacagtttttagcttacatagagaatcaataatttattcgccaacgcccattaatgaagcaagaatgaataataaccaaatgtgaattgggtagaacaagtagaagaaatacttcatgctacgtcctttttgtccgttgtacaagaggattgggataatcgcgaagatcatcatccattgcgtattgctagtgaagagtccagtgaaggcaaatccggagttgattccagcgtcaaggaatgcgaaaacaagaacggtaagacattgtaagagccggttgtttcggaaaagataaaaaaatactcctatgtagaggagaaggccattttccgcaagcataatggttggaataaccattgcgagattggcagcaaacatcattgtcttagggttagcaattagaccaagcgccaataatgataagaggataggagcaataattgccagtccaccaagcaaaatttgtttggaatggtgcgtgcggcgaccgacactaatttcttgaatcccatacattgctaaaacggcaatgtataaatcggtaaaaatattgtttgacagtgcgaggttaccgacttcgaagaagtgttggacaatggggcttcccaagttcataatccaaaaaccaacgagtaattggaacatgtaacgtttttgattccgcgtatgtatgaatccttcaactgccataaagaagaagatggtggcaactggtcgtccgaaccaatcaacccagccagggaccccagccccggcgaacatttggtgcacgtgatcaataaacatgaggataattccaattaccttgacgtcgaagttatttaaaacttgatatgatttagtctgcataatagcctccctaaaagttaagtaagtacattatcgtatgtttagctcatattattaagttttaaatggctagtgacaataatgttagatagcaaaaaccacgataaaaggaatttatcgtggttctgagcttatttagcaatttggcttgtgccatctgcgtaatttaatgtaacgccgtcttggacgttaaaaatgtaagtgttaaattgaatgctgttatccccgacggattggccttccatttgaacgccgcgggctagcagctcattatcgttaaaaataggtgtgacacggtaacgaacaaaacgattagggtgttttttgagataataagcaatatctgattcatgggccagcatttcgggtgcgtttagctggcgtgttcctgtcatcagattctttggattattattttcaccggttagttgatagccaattaaatgactccgattatacagccagccagatttaatccgcttattatgccaaccggtcggattccaagtgagtccttcgcgcttggcagtaggcatcatcgattgatttaaaagaacatttgcagcaccaacgcgatttagtgcgtcgagattactaaaggtttgccaaccaccgtgatcggtagccaaatcagtagcactgaagcttggttggttattattgacgagtacctcgttttcaccacggtaggtgagggccgcgagctctgatgtgttatgacgctcaggaccagtcgtttgcatttgttgctgatagttagtgagttttttgtttaactggttaattttacgttgaagcgcattaatttgacgttcggtttttttgttgtgcgcattaatgcgcttggtttcttgacgtaaggtggtagcgtgaacggtagttggttgttgcaaaagggttccgacaccagcaagtgaaattgttaccaccacgcgacttatcaaacgggttgctttcattggctaatcctcccatccgcaaagggtatagccttctgcttgtgcttgtgacaatggcatggttgtagtactgttggcacgacttaagccacggcaattgggatcaagatggtattttttaccagaattaggggcaattgtcaccatttgttcaacttgttgagcactagcagcttgttgtgcttgttggcttgcctgaattgcagcctgttgctgagcggcctcgctagcttgactagtagcggcgattgaggctgaagccgcacggactctttctgactcagacgctttttgctgctttttaacaagtcgtgattgactggcaacttgttttgtcagttggctagcctctgttttctttgtagctagttgtttttttaaagcgctcgagttagcacgggccgccttgttttcgcgtacatcaacttgatgttggctggtcttcttggaattcgcagcagccaccggcattaatgaaccgcctaagccgattaaggcgatgatgataatcagtacgcgacgccattttctgggtcgttgccggttaaagaatagtagtgaaatcagtgcgctccccaagaacgctaaaaataaataggacataataacctccaaagtaatgaataacagttcttaacgattgtatattgtacataatatgaaagcaattataaaaagcctaggcgtacctaggcttttagcggttaatctttagttgtgagtgaaacaattgcttttgtttgatagtatttttcaggattggtttcaaaagttaaccaatctgcatcagcgaatagaccagccaatgcaagaattgggcgttctttagcgagttgttgttcgctagaagttgcaatggcgtcttggtagctaccattgaagatttcatctagataaaaggcttgatcatcaccaacgtttaaataggtagtatcattcttccaagcatgtagcaaatccatttccgaaaaagtaacggtttcgttatttgaaaaagtcatgataaattgcatatgggtcaactccaatcaattaattaagcaacaatctatttggttgcctgcctaaattatagcatttagataataaaaggcgaaccttttgacagtcattgtggttaaaaagtagaatgaaggtgaacaaaatagaaaggaagtcattgatatggcaaacgaagaacgattagatagtttgaaaaatgtaattgaaggcacagttaagaaggttgtcagtgaagtgacacctaataaagataagaaagaaaaggcgcaaaaagctgacaaaaaataggacttagtaatgaagtaaaggtcaaaatcatccgtttggttttggcttttttattggaaagccgttaaatgcgttcgcttttacgaggcaggcttggtataatttaaaggatagtcagaggaagtaggtacaattaatggattacgcaggaatgttagaccggcaaaagcacattcgtaatttttcgatcatcgcgcatattgatcatggtaaatcaacattagctgatcggattctcgagatgacggatactattgccaagcgcgatatgcaagcgcaagtcttagatgacatggaattagaacgtgaacgtgggattaccatcaagttaaacgcggtggaattacactaccatgccaaagatggcgaaacttatattttccatttaatcgatacacctggacacgtcgatttttcatacgaagtgtcacgaagtttggcagcttgcgaaggcgccttattagtcgtcgatgcggcccaaggggttgaagcacaaacgttagccaacgtttatttagcggtcgacgatgatttagaaatcgtccctgtcattaataaaatcgatttaccatctgcacaaccagacgttgttaaagcagaaatcgaagagatgattggtttggatgcttcagaagccgtgcttgctagtgctaagagcgggattgggattgaagaaatcctagaaaaactggtaacggacgtgccagcaccaacgggtgatttaaaagcaccattgaaggcgctgatttttgattcgatctacgatagttatcggggtgttgtgttaaacgtgcgggtttttgatggcactgttaaagtcggcgataagattcgcttgatgaataacgggaaagaattcgaagtcactgaagtcggtgtgatgtcgcctaaagccgttaaacgcgacttcttaatggttggtgatgtgggttatattacggccagcatcaagaccattcaagatacgcgggttggggatacggtcacccttgctgacaatccggcagcagaagcccttgatggttatcggcatattcaaccaatggtttattctgggatgtatcccgtggataacgcgaagtttaacgacttgcgtgaagcccttgaaaaattacaattaaatgatgccgcgttggaattcgaacctgaatcgtcacaagcattgggctttgggttccgttgtggcttcttaggcctcttgcatatggatgtcgtacaagaacggcttgaacgggaattcaatcttgacctgatcatgaccgcaccatcagtggattatcatgtcgatttaaccgacggcacagaagaagtgattgataacccatcagaaatgccagaaacatcaaatatttcagaagttaaagaaccgtacgttaaagcatctatcatggtaccgaacgattatgtgggggctgtgatggaacttgcacaacgtaaacgcggcgaattcgtcacgatggattacttagatacctatcgggttaatgtcatctacaacatgccactgtctgaaatcattttcgatttcttcgatgacttgaagtccaataccaagggttatgcctcattcgattatgaagtgactggctatcgtgcgagtgatctggtgaagatggatattctattgaacggtgaatccgttgatgccttgagttttatcgtgcaccgtgactttgcctttgaacgaggcaaagcgattgttggtaagttgaaagaaaccattccacgtcaacaattcgaagtgccgattcaagcagctatcgggaataaagtgattgcccgttcaacagtcaaggcctaccggaaaaacgtgctcgccaagtgttatggtggggatattacccggaagcgtaagttgttagaaaaacaaaaagccggtaagaaacggatgaaatccgtgggttcggtggaagtcccacaagaggcgttcatgtccattttgaagatgaatgatgaagataaagccggtaaataaggattcttaaaaatttaatagtgataaaatagcagttttgccaacattttgccaacgtcaattttcgttggttggcaaaactgctatttttttgtgtttcgaattattcaagatagtgctcttgccaacattactcgttctgaatttgttcgatcagactaactgtatttttgcgcattttatgagtgacatgagaataagtgtccattgtagtgctgattcgagaatggcctaaacgttcactaacgactttcattttttctccggcttctagcagcatagtagcgtgagtgtgacgtagtgaatggaaattaaaattcttatgcaatttgtcttggactaattgcgccttatatttaatcgagttaggaaggacgggggtaccattttcttcggtgcacacaaagttactaataatatgcattattataaaataatttatttttttagggttttacacgtaaaagggttgtaaactcccgttattttatgatatattcaataacagaaatgattaatactcccccaagtaagatcatttcaatattcagaagatactcggtataggcctttcccaattaaggtttatgccgggtattttttgctttgaaagcaaaaaaaatagtcctgacggactatttttagaagcggtttgttatgcaaaaatcatttggaaaatacctgcgccacagatggcaccgataattggtgcaacaactggcacccaagcgtaactccattgtgagtcgcctttgttcttaagcggtgtgaacatatgcaccaaacgtgggcctaaatcacgagcaggatttaaagctggtcctgttgggccacctaatgaagcaactaatgtcatcaccaataaaccaacaacaatatggccggcagcgccaaacttacctgcaccaattgctaaagcaccgaaaactaagatcaatgtgcctaaaaattcatttacaaaaccattcatccggctatgagcagcatcgattgttacgaatgagcccaagatgccttcttggtttgttgtgcgatcataatatggtttgtaagcagcaaccaataataattgaccaaccattgcacccaagaattgaacaatgatgtatggtaaaacattttcccaagggaataagcccatcactgcaaaacttaatgtaacagctggattaagatggttaccggaaatgctcccaaacataacggcaggaatcataaccccacaaccatatccaaaagcgattaaaaaccaatcactactaaaaccttttgttccttttaattcaacgttggctactgccccgttaccaaaaataatcataattgcagttccaataaattcggcagccaaacgggttgtcaaagaagcgtccactactattcctcctataaatgattcatatttttacgtatcctattataatacgggaaaatgcaaggaaaaacaattgacttttctgtttaaatccctttcatgagaagattcatatttttacagacctttctgtaaatttgacttgctaatatctcataaaatgggataacattcattgattaaccgtattaaccctgattatccgattactgttttggaggttactatatgaacttaatactcgccatcgttctttatgcaggccttgctgtctttgcatttggcattatcctgctcctatttttcttaatttttaaaaaacggcttaaagcccctctaattatttgcttgattggtttgattatcgcggcatctcctgttggctataacttctacatggctcagaaagaacaccgcgaagaactagcgaagattgaaaagaaagataaaaaattcgataaagctgaacgccaattcatcaaacatattaaaaaatcgactgttgccactgaattcatcgctcaaaagtataataaagtttggggcgagttaacagaaaacggaacagttaacgtcgcaaatgttgattataacgatcatgatagtgctgttgctgctgaaggtcggcgtttactagcacaaggtaaactcgatgacgctgatgattactatgtcagtgttcaaggtgactaccaaaaaatgaaagactacgcgactgataacaatcgccaagaactcgtttatgccaaagatgtcttatccaagactgggtcgttcgtctctgttgcaacccgtccaaacggaactttccaagaatacactgatgatgtttacaaggctaataatcaacgacatgtccgcgcaattcagaagttgaaattctcttacagtagtattaaatagtgaatatggtgattttgaaaaaaagatgaaatgggttacaatgaagtagaagactggggagtcttttattttttgattcatagttaaccctattatcgattgggagtgtgagaaatgcgtcacgtcaaattattattcatgattttaggtctaacttttattttaaccgcttgtgggaatccggttaaagcaaagctccacgaaacaaacagtggcttcaatgcgcaaatcactggtaagactaaacataaaaaggtttattggcaaatcggtgataccattcatacgactaaaacaaccgatgatgctttcgcattcgaagtcccttacaaagctaagcagtaccggattacacttgctgataatgaagaaatgcgtaatccaacttatgttgaaggccctgtcgcaaaagaaattgtgcaatggccgaactttattcagatttataatccgattgcccaacaaaaaggactgggcgttttcgaagcgaatccacttgaaggcattcgcactgatcaagttgacagcaacaacgtgattgccatgaacgtcagtgatagcaaagtactggggatctcaattaaagctctcaacgcaggtaagaatctaacgtttaaaaactacgtcctcgccttttcaacaagtatcggaaccaaaccaacccagattactgaattggtcgaccgctcacttaagaaacctgggtcattaatgcaactgacggatcgcgaagttcgctataccgttatgacgaccaataacaacaagcaacaagtcacacaactttcaattaatcatttataaaaagaaagccgccgaatctacgattcgacggctctttttttatatagtggttaaaaaatttcgggagaaattattcacattcttattatagggcgcagttcaatcaaagtaaacgatacggtcggcacaaattagtggtgccaaattgttatagtcactcaaccagctatcccctatcgaatttaaagtgcttatttacggcgtttcttcgtttaaaatgctatattgaaggtaaataaaggaggtcttttttatgtttaattatcagcatattcttatcggtttagatggttctgagttatcagaacgcgctttcagtgaggcgattgaaattgctaaacgcaataatgccgaattagttgtggctcaaattattccagataccctttacacaaatgcacgcatgacttaccctgctgaaacaacgacatctgaaaaacatttcgttcaatcgtatcttgatcaaaaggtgcaattcgctaaagaacacggtgtccctaacgtacgagccatccttaaagtgagttcgccacgtcgtgaattagcctttaccatcccagaagaagctcatattgatttaacagttctcggtgtcagtggtaagggcgcctttgagcggctcttaatcggttctgttgcacaattcatcagtgttcattctaacaccaacgtcttattaattaagccttaagccggtttaaagattggttaagtttaatgctttgtttttgacgtgtcccatttctaatatataataaaggtagtttaggagtggttcgaaatgccgtttgatatcactaaattgtctgatcaaaatattaagcgctggttcttacaacatcgccaagcaatcgttgcaacccttttgcacccaaacacttggtgggcaagttttaatcgccaattaatgcgctttttccaataatcactaaaagtgacgactgaatttgccgtggtcactttttttaatgacgtttttttaaaggagttctgaccgatgaccgagcaaacttatacttttacagcctcaatccaagccgcgacgattggtaaaggcggtgcatatgtctaatttcctggcgatatccgcgcaatcttcgggaagggtcgtgtaaaagtccacgcccttttcgaccaacaaattccctatgatggcagtattgtcaatatgggacttaaaaagccagatggcaacatttgttacattcttggggtccgcaaagacatccgtgcacaactcaaaaaagaaattggcgattccatcacagttgaaatccgtgagtggctatagctattacgcccctttaaatgctatactattttaaatatttatttcgtcgactaaatttagaatgaggattatcaaatgccaaaacacttttacaagcgcgtggcagtcgttttaatactgattaccaccctttttttatggcttttcacaggaccgaccagaagtgaggccgggatttggttcttccataaaaccacaccccaaaaaattgttaagaaaaaaacacccaaaaaaacgatgctcgacatcacacccatttcacaatttcctgaattaccaaccggttgtgaaattacggctgttgccatgctgttagattaccgtagcgttgacatgagcaaaacagaagtggccgatagtatcccttatgtcaatgatggcgatatggaggtcggcttttgggggaatccatacgatgatactggctacactatgtatcctcctgcttggacaggattcttctatcaatatctcggcagtttcaccgatttatcggacgaaccgattagcacgctcaaagctactttaaaacaaaagaaaccaattgtcgcttggattaactaccataaacaaccagcgcattccgtcttattaattggctatgatcaaaattcatttacctttaacgatccatataccggcaaacgaaaaaaaatctcatttgataaattctggaaaattgctgcaccacagggacaccgtgcaatgacttattaatcattaacttgggggatttaacatgcataaacgaaccattgcagtcactttcattactttaagtagtctttcattagctagttgtcggtcaattaaacctgatcaacaagccgcaacccactccgaaagtttagcacgctatcgcgcctcatcagaagcaaaagaaagcaatcagcgtcgatcaatcgctagctcgaaagaagcttctattaaacaacaatcagaaagtatcgttgcagcttcagaatctattgaacaagcaaaacaacaatctaatcagtcaacaagtgccaaaaaagcgctcactgccgaccaacaaacttctgttaatcaagcttttctagcgtgggcggctgaacgcgccacaatcggaaacatggccgtcagtgattggtattttgaccacggtgctgccggatttggcgattggtttgccaattcacctgatggccgcattttagttcaacctgggacagcaagcccagggtttaatgcctaccctgttcatgcaattggtggctgtgtcttttataccgctttggatggaacagtcggtaaagacaatttagatcgtggatcattcgcggataattacagccttaacatggcaatggacaaaccggttagcaaatacctacttggtgataacggcgtcgtgtatgaacttaaattaggtaatggtcacctcacatcaactaatgatggtttcagcgaactaaaagatgacggcaaacaagcttactcagaaccacttgtctttgccgtttctgaagacaccgctgcccaagctgaactaaaatctttacttgctaactattagagtttaaaggagcacgactatgaacaatgccgaactacaggcctatcttgaagaacattcccgcgtcatcgatacatttcgagccaaaggtttagactaccaaaatgaaaagaaccaaaaacgccaacctgccaaacgttggaacgagaataaggtcgatcgggccgttgataaaatggtcgccgaatttatcgctagtattcaagtgaaaatggcattcaacattcgtggtgaacacgccaaagaatatcaaacttggttaacgttcattgaacaaaatgaagttgtcgaaggcttggaagaatcggttaatgaaatggcgtttgaatattagaaaaagtagtttcttttaacgaataattttccgaaaagtaattgcacttgataatattaagggtattgaattgttaattatccttgtgattttcttatcaatattatatgatttacttacgaaaggtggttttaaattatggttaagttattctttaacgagggctcaaaaattgcgctccaacaaaatgacacattatctgcctttggttctacgaatggttcacgccataagttgaccatcaaagactgtgctgctgcagatatcgtcgcaaaaatctcgcactttgttaaggacacgccggcttttatcctcgaaaatagtcctagcgaaacttatcacagctcaaatctcattatgattactacacgttaattaaaagactgccgttggctggtcttttttattttataactcaaaacgccgctctcttgagcgacgtttttctttcagattaactttattgatttaaataattatataagccgcgcatggtcgcatccgccaacgttaatggctgcccatccaacgtcccccgcttaattgcgacgtaatcttcgaaatcgggtacttccagttgttgatttgcgacaaattcagccgctttttgataaaccttttcagcgttcgtttgaccgttgacatattgaatgactaacattgccatcatctccatttttacttttaatattattgatgaattggtcatctttgataaggtcattatacttcgcttactaaaaataagcaatttatatattttattctttatccgtattaaacaaaaagcatttaatccatttattttagaacaatgcaccaaatactgcaccatttcataaaatcaatagactaaatgctttaataaaagtcgaattttatctttataaacgttgaattataggcgttcgtttaattctttgcctaattcttcaaagccgggtttgcctaataaagcaaacatgttcttcttgtaagcttcaacacctggttggttgaatgggttgataccattcaagtaacctgagattgagacagccatttcgaagaagtagatcatgtagcctaatgtgtaggctgtttgatctgggatgttaactgacataacagggacgccgccatcagtatgtgctaagacaacaccttggtaagctttcttgttaacgaagtccattgtgtggccttctaagtagcctaaaccgtccaagttcttttcatcagttggaatatcaatgtcgctgttagggttcacaacgttgacaactgtttccatcaagttacgacgaccttcttggatgtattgacctaatgaatgcaagtcagttgagaagttagcacttgaaggataaatccctttttggtctttaccttcagattcgcccatcaattgcttccaccattctgagaaatattgcaatgttggttcgtagttttctaataattcggttgtgtaacctttgcgataaagaatgttacgtaaagcagcatatttgtatgcatcgtttttcataacgtctgtatctgtgtattcagtgcgggcatcagctgcacctttcatcaattggtcgatatccccaccagcaacggcgattggtaataaaccaacggctgttaatactgagaaacggccaccgatgtcatcaggcacaacgaattcttcgtagccttctgcatctgattctgtcttcaaagcgcctttagcacggtcagttgttgcgtagatccggctcttagcttcttctttaccatatttcttgatcaacttgtctttcaaaacacggaaagcaattgaaggttcagttgttgttcctgattttgagataacgttgattgagaaatcgcgatcgccgatcaagttaactaagtcgtttaagtaacttgaactgattgagttcccggcgaataatacttgtgggaagtcacgttgttctgctggtaacatgttgtagaacgtgttattcaagaaatcaattgcagctttggcaccgaggtatgagccaccgataccaattgcgatgaaaatttctgaatcgctcttaattttagcagcagctttcttaatgcgggcgaattcgtccttatcgtagttcactggtaaatctaagaaaccacggaagtcgttgcctgcaccagtgccttcacgtaattgtgagtctgcagcattaaccattgcttgcatttctgcaagttcgtttgattggacaaatttgtccaaacgggatgcatcaaatgaaatatgtgccatatttgtcttattcctcctgtttttaaacacaagtatacgttaataactttagcttttttagcgctaaaaagcaagccagatcgaccgctttttcagactagacccacctttattttcaaaagaaaattactcaaagtccttgacttgtttcacccatcccgctatacttcagatcatcaaataaaacggaggttactgaaaatgacaaacactcacttagtacaattgaatattcgttggcaaagccgctaagtgagattgtatgccgttatggatacagtcttttgattgtatccatgcggccattcatcagtaatcgattgaattttaagcctacatggattttaactcgaggaaatccatgtaggctttttctgtcccctacatgactgtcatgtgggggacttttttgtttgataataatgagtgcgttcaaaccgggtatatttcgaacactagcctagtggtgcgaatgaacgacgcagtcggtcgtttgtgcgacgtagctaggcacaggaatacggtttgaaaagcacgttaaaaaatagaagtgcgtttgaaacggtttgactctgagcattaacctaatttaccaaattggtgatgtaatcaccggtttggtaaatgtagttaagcacaagagtcagtttcaaaaagcacgttaaaggagctttcgccatgtctaaactcaaacgttttttacccctcattctaatttttgggagtttgctcaccctacttggtatcaaaaaaatcaaagaagccaaccaacctaaattgccaattgtcgggattttacaacccttatctcatcccgcacttgatgaaattcatcgcgggattgtcgctggtctagcaagcgaaggctatcataacaaccgtaatatcaaaattgattttcaaaatgcgcagaacgatcaaagtaatttacgtctgatgagcaatcaattcgtcactgaaaaagccaaagtaacggtcggcattgccacccctgccgcacaaagcttagccaatgccactaagcaattaccgattatcttaggcgccgtgactgatccggcgagtgccaatctcgttaagaacaacgcccatcctggtgccaatatcaccggcgtatccgatcaagccccgattcaaaagcaattggcattaatgcaaaccatcatgccgcaactgaaaaccgtcggcattctctattcaagcagtgataactctgccaccagtcaaatgcacttattcaaacaacttgctgaacaaaaagggctgaccgttgttgaggccagtcttagttcagtcaacgatctggaacaagtcagccagaatctagtcccaaaagtcgatgcaatttacgttcccaccgataatacgattgctagtgtaatgggcaccctcgtccatgtgaccgacaaaaccaaaacgccagtctttccatccgctgaaacgatggttaaagatggcgggctcgcaaccgtcggcctaagccaatacgacttaggcgttgaaaccggtaagatgaccgccgctgttttaagtggtcgttcaaaacccgcaaccactccaattcggtatttacgcaaaggacatttagtcttaaacctcaaaaaagcaaaagccctccacatcacaattccgcagagtttaatgcaaatcgctaatcaaaaaggagctgttctcaaatgaatcttattatctcaaccattgaccaaggattattatggagcctactaagcctaggcgttttcatcacctttcgaatcttaaaattccctgacatgaccgttgaaggcagtttcccgttaggcgcagccctcggcgctttaatgttgcaacaacataacattgccttttccctattagtcgcattcatcggtggctgtttagccggactcgtgacggcaattttatacaactacttccatgtccagagtttgttagccgggattttaacgctaaccggtttgtattccatcaacttgcggattttaggccaagccaacatggcaattggtgatcaacacaacctatatcaactgccgctattccatcaattaacgctcgatcaacggctcttagtcattaacctagtcatcatgctgatcgccctattattactggctggcttactctacaccgaattcggtcaatccctgattgcagctggtgataatcccacgatggccctctcacaagggattgccgtaaagcggacgaaaacgattgggatcgtgctgtcaaacggcttgattgcccttgcaggtgggctcgttgcacaatataacggctttgctgatgtcaacatgggcatcggtgtgatggtcattgggttatccgcgatcatcattggtgaacggctccttgtcggcaagcatttcatcgccaaactaattagcattatcctaggaagcgtcgtctaccgcctcatcttactccttgtcttacaactcggctttaacgccaatgatttcaaactcttctcggccgtcattttggccatcttcatcatcgcaccacaacaaaagaaaggactgactaccaaatgaccccgcgtatgactttaaaccacctcaattttgaagttactgataataatgaacctaaacaactcttaaatgatttaaatctcacgattaatcctggtgaatttgtcgtcctccttggcgcaaacggtgcgggtaaatcgactttttttaataccattgcgggtgatttaacccccacaagtgggcaactactattcaacgaccacgacattacgaagcaatccgcccaacaacgcacacggctcattagtcgtgtctaccaagatcctaagttgggcaccgcagctgatatgaccgttgccgaaaatattttgttggcgatgcgccgtggccaacgccgccgcttatttccccggcgtctcaagcaacaactcccacaaatcaaagcgctcgccaagacactcccgaatcacttggatcaacaactcaatcgcccggttagtaacttgtcgggtggccaacgacaaacgttaaacttcttgatggcgacgattcaaaaacctgaattgctgttattagatgaacacacatctgctttagatgcagtttccagccaagcattgatgacttttaccaatcaaacaattcgcgataaccaactcacctgcctaatgattacgcatgatttagaggatgcgttgcaatatggcaatcgactcttggtgttaaaagccggtaaactgattgccgacttgaacgcgactgaaaagcaagcattaactgtcgatactttactagactatttaaactaatcaaaccgcgctaaccattttcggatagcgcggtttttgctgcttaaatccattcaatcttatcaagcaccaatttatcagcggttaattaattaaggatatgattaacctacgtttaacacttgtaatcgttttctaagtatgctaaattattcccataaggttgtgtgcaacctaattattgatttaagggagatctgtataatgacagttactactcaaaaaactattccagctagtgttgctatgcttagagttatcgaatcttggggcgttgatcatatctttggttaccctggtggctcatttaactcaacaatgaatgctcttaatattgaaaaggatcgtttaaaatatattcaaattcgtcacgaacaagttggggcccttgccgcagctgctgacgctaaattaactggtaaaatcggggttgcttttggttcagctggccctggtgcaactaaccttttaactggtttatatgatgcaaaagaagatcatgcaccagttttagccttgattggtcaagtaccaagcaagaacatgaactacaactacttccaagaattcgctgaaaacccaatgttctctgacgttgctgtttataaccgcctcgttatgacacctgaaagcttgccatacgttgttgataaagcaatccgtgaagcttacaaacacaatggcgtcgcagtggttgttattccaaatgacttcggctacgttgaaattccagatacaccatatagctcaagctcaccttcagatcgtaaaaaagtggctggtccagtcgcaacagacgaagaagttgatcaattcttagcaatggttaaagacgctaaacgccctgtaattcacgttggtcgtgggattaaagacggcggcgataagctcgttgaattatcaaagaaacttcaaattccaatcgtcatgactgggcttgctaaagggttagtgcctgatagttatgaaggtaacttaggcatggctaaccgggctgcttctaaagcggctgatgaaatcatggccgttagtgatcttgtgattgccatcggtgctgacttcccatttgccaacttaatttatcggacacatgacttcaagtttatccaaatcgataacgatgaagcacaatttggccgtcaccatttcttagacttcgggatctggtcagatgcaactgcttttgttgaaaaagtaatcgccagaagtgaaacggttgccccaacaccattcttcaaagctgctgttgctgatatggcaaactggcaagcctaccttgatgttttaacgaaccgcgactctgatccgcttgaattcgaaccaatctacaaagaaatcaaccggattgctgaagacgatgctgtcttttcaatcgatgttggtgataatatcatcaacagtttccgtcacttgaacttaacgcctaagaacaaatgggtgatttctgccctctttgcttcaatgggttcaggcgttcctggtgccttagctggtcaattgagctacccagatcgccaagtcttcaacatctcgggtgatggtgccttttcaatggtcatgcaagacttgatcactgaaaagaaataccaattaccaatcattaacattatcacatcaaatgccgcattaaacttcatcaagagtgaacaagatgatattccaatggattactcaggaatcttcattgaagatcaagattttgccatgattgcgcaagcaatgggcattgaatcaatcaccgttcgttcttctaaagaattacccgctgcctttgacaaagcccttgaagtcacaaaagctggccgaccattcttaattgatgctaagatcactgacaaacggagtattccagttgaagaattagaactaaccattaaagatggtaagttaacagaaacaattagcgcaagctatgatgcttctcgtcctgctggcaaagaatacagcgtggctgatttcttcgcagaatacgatggtcaatcactgaagacattaccagaattatttgaagaaaacggtgttgaactataaaacaacccggccatcataaaaatagcgtctcaacacattgcggtgtgttgggacgctatttttattgatttaatttttggtaatggcttctttaggatggaaccaaacgacgttcttgtcgaagaatgagactaagtcgtttgataagtacaagatataggtgaagaataagacccaatttgaaccaccctgcattgctgtaatgccccacaacgtgattgatacgatactttggatgaaccagaagtaatagctttctttaaaccgtaatgtggtcaacagtgcgccagtaaacccaactgaagcggcgatactatcgatcaatggtcgtggactgtccgtcatattgctttcccagagatataataacccaactgatacagcaaagaacaatagcgtcaacgcccaattacgaagtcctttaccacgagtagcaagcccccggacttttttatcaacgttttgcgcccaatctggcattaataagactgggatgtctaacataataatgtagacggtttgtaataacatatcgttatagtttttagcattataagccacaataatgtagattaatgcagagatgacaccaaagacaccatttaaaggtttcgtattcgtaatactaatagtacaggtgaagcctaacatccccgcgagcatcgttaaaaacgacacgccagttattggaccaccggaaatagtagcagctaaaataaagcctaacccaaacatcaacaaaccataactggatgttgtccaccctttcatctgttgaatataccacttaggattaaatacactggtgattgcacgattgtcttgcattgaactgaaaccctctttatatgaatttagttatcactccagatcgtcaacaccattttccatatattgatgcaccatctgacgaaacaacactatatatggtacacgctaagcattctaatttaaactcttgtatttaattcaatttgtggtagctgatttcaaagcctttctgaaagtgccgttaacttacgattgcaagcgctgaactagaccattcgaaaatattttttatttttagcgttcgttgtcaagactcaattcaatctttgaccaatggcttaatagtctctttgatcaattgaccggagaatgacttcattaacgcccacattatctggtgtatcgatggcgtacattacggcattagcgacatcggttgctgttaatccagtttcagtttcgctcttgagaacagctgctcgtaattgcggatcactaatccggctggctaattcggtttgcgcatgtcctggagagatcaacgttgatttaatgcccattccaacttcttctacacgtaacccttccatcaccgcgcgcattgcatatttagtggctgaataaacggataagccttcaccagtgaaatgaccggcaactgaatccgtggtaatgatatgaccactcttttgctgttccattaaaggtaaggcatatttaatgccatatagcgcacctttgatattaatatcaatcatagtctcccactcatcgactttaccatcgcgtagcattgagacgggcattaagccggcattattgaatagcacatcaattctaccaaatttagcgattgtcaattcgattaaggcttgcatgtctgctaattgcgtcacatccgtttgtcggtaaataacctcagtgtcgtattgagcggttaacgccgttgccaacgccgccaacgcacttgttcgtcgagccgctaaaacaagttttgcgcctttggctgctaataaggtagccgtctctttaccaatcccacttgatgcaccggtaatcacaacgactttattttgaatatcattcatttcttttcccctcactttttagttgataaggttagtatatcgggtacttcgcaataaacaattacgcactttcaactaactaacgcacctcaaagtaagttttgtgaaatcactaaaaagacgacaacattctttttgaataaatgttatcgccttctttaaatatcgtatttctcatggtctcgataatccaactgcacatcatcaccattgctctgtaaaaagtcgattctatcttcgccccacttggccatcattcctaggacggaaaccaatgatttgccgtacgcagaaatcgcatactccacgtgtgggggtacttcgttaaaaacttttcgagtaatgatgccatctcgttccaattcacgtaattgattggttaaaactttggctgaaattccctgaacgactcttttaagttcggccggtctttgaggtcctgccacaagatgacagagaatcaacggtttccatttcattccaatcactgataaagtcattaaaacaccgttggtataatttttttgtggctcgttcaaggcctttcctccacttcttgatgctgatttgtttgtctatcataccatcaaaaaaaggatcaggacaatcttatctgtcctaatccctgattaattattctggtcgataagccgctttagcagcgttcatcgccgaccatgccttaggccagccgacataaaatgataaatgcgtaatcacttcgacaatttcagcttcagtaatgccgttttccttatcaatctttaaatgcgctggtaattattcaaaattaccacctgaaatcaaggcactgatggtgattaaactccgttgatgtgctggtaactctgattcacgcgaccaaacttgcccgaataaaacatcgtcgtttaattcagcgaatttaggtgcaaaatcacccaatagatcgcggcctgctgtttgtttctttgccattttaaaaacccctttctgaattaaagtgcgtcataaagcgcatttgaaacagcttctaaccattctggtgtgccggcagtgatggcgacatgactaaaccagctatccttagtggccccatgccagtgtttgatgccgtctttagtaacaatcacatcccctgggactaagtgttgtgctgctttaccttcttcttgataccagccttcgccaccagtcaccaatagaatttggtacccagcatgatggatgtgccaattgttccgacaaccaggttcaaacgtgacattcccgacaccgacattcacgtctggttcgttcactaacattgataaataactttgaccgacgaagaagtcttgataagccacattagcttctccaactgggaataattgtttttcttttaattgttcattcttgaccattctaataacctcactttattaggattcaaatcgttgtaaatacgtttcaaaactctctgcttgatcgatactctgatccaatttaccatcataccaatcaattttacgcgttaggatctgtaaatttgcttggcgctcagccaattcggcttcagcttgagcctttgttttttgcaataaagctttgcgcgcttcaatcgtcgcgtctccttgagcccgcaatgcaacatattactttaattctgtaatccgcataccggtcccttttagatggagtataaacccgacccacttaacgtcctctaatgtataaaagcggacaccggccgcatcgcgttgcggcataatcaagccttggtcttcatagtaacgtaatgtgtaagtcgacaaaccaactaatttagcaaactcgccgattttgtactgctcttgtgccatcgacatccctcctacaaaaatagcttataccttagagtacactataaggcaagttttttaataaataggacgatcgccatcaatattcggctgattaatgccccaacttgccccaattcctttttcaggatgattaactaaatcaacaacaacttgcgcgatactccgtcgtgaaataatcgtccctttaaacggtgttcccttttcagttaattcgtaatcgatccgatcttcattggtcatataggcacaacgtaaaatggtatagttaagcgaagattgttcaacaatcttcgccgcccgccgcgtgtcatccatgacttcatggccgactgcttgttcattccactcaccaaaagcacctggcacttcatgatacaagcctaatccactgatatagattaatcgtttgatgcccgctgcagtcattgtcgcgacaacgttttgcattaatggttcgaactgcccgcctaaatttgcgtaaacgatatcgaccccagctaaactgtctgccaacagctcttgatccaacacatcaccttcaataaccgtgacatgtggattttgtgctaatgcgcttagccgttcagcgtgccgtaaatatagcacgagctcatgttgattttctttcaacagttgctcaataactaactgggccacttgtccggctgcccctaatactaaaatgcgactcattttaatcaccccttctttaatgtctttagcatattccttaaagtacactcgaaggcaagccatttttcaaatttaattggtctaggttgctacttgactttcaaattaaattgactaaaatgaaagttgttattaattataatcattataaagtaataaaaagtattggaggcttcaccttgtcaaaaaaattatcactcgcccaaaaaattaacgtgatgcgggctagcgtcatgggtgccaatgatgggattttatccgtcgccggaattgttatcggtgttgccggcgctacaagcaatagcttcgccatcttcatttcgggaattgccggaatgattgctggaacgatctcaatggcgatgggcgaatacgtctctgtcagcacgcaaaaagacgcacaggaaatggcaatcattaatacgaaattgaatttaaacagtaattatgcgtctcagatggcttttgttcggcaaaaatacgtcaacactgggattgatcctgaacttgccaatcgggctacacacgaaatgatgactgctgatccgttgacgactgtcgtacgtgaaaaatatgggtttgtcccgactgcttttaccagtccttacgcagccgctgttgcgtcattcatctcatttccaatcggttctattttgccactagccgcaatcaccttattaccccaaaccattcgcgtgcaagccaccatcattgcagtgatgattgcccttgcgctaaccggctacagtgcagccgctctcggcaaagcgaatcgttcaaaagccatgttgcgcaatgtgatttccggattattaaccatggtagtcacttacgctattgggacattattcaaacaataatcgcttagaaaggatttttttatgacccctcttaaagccccactcaaaacaactgaaaaaccccatcaaacgatggaagaaaagatgaatacccttcgagccggcgttctaggttctaatgacgggattctaaccgttgtcggtgtgctctttagtgttgccgccgcaacaaccaataatttcaccatttttatcgctggacttgctgatttattagcctgtgctttttcaatggcggcgggtgaatatgcttcagttagttcgcaaagtgacacggaaaaagccgctgttgccattgaacaagcacgcttaaaaacagctaaagatgatcaaattaaagaagtccaagctttttacgaagccaaaggtgtcacttctgaaacggcactcgcaatcgctaaggacttaatgcataagaagcctttagcaacaattgttaatgttaaatatgacctagagcttggccattatatgaacccgtgggccgcagcgtttgcatccctcttctcagccgctttcggtggcgtcttcccccttgtgacaatgattctactgcctgaagcctacaagatgaccggcacaatcattgccgtcaccatcgcggtttccattaccgcgtttatcagcgctaaactgggcgatggcaaagtcaaagtctccattattcggaacatcctaattggtttaattacaatggccattcactacgggattggccaactcttctaaagaaatccgtcatcatttgttctaatctaacttaaattcagccacaaaaaaaggcgtcgagcttaaattaacttttagctcgatgcctttttgcttatctaattttagttctcaagaactgggcaattttttcatggccagcatcattgggatggagactgtctaaactcagctcagccgcttgttgtgcatccgcaaatgacaacgctgattcgttaaacaaactgatatgctgaacgccaaacaagtccgtcacttgcgcaatcgcttgttcataattttgttgctgataaccgccttgattgacggccgaaaagaagtcagtcccaatgtgaacgtgcgagataaaataaaccgtcgcttgtgggtaacgtttcgtaatctgcccaagtaatttttgtagtgcgccgtagaatgttactgtggactgatcaccaaattgaccaagtggtacatcacgaccaaagtcattcacacccgcataaatcaataataaatccgttgattcaggaatggcttgccagcgttcaaccatcggatcatacggttgggcaatcgtcgaccccgaaattccgagattggtgattgtgggaatcgcgagccattctgctaaccactggtagtaccatttgtgtgcgtaatgattacgttgatccgtgatgctatcaccaagtactgttaaatgttgatattgtgtcatttgctacttcgctcctaattctgagtaatccgtcagttgccaactaaattgatcccaataattggtttgctttaatgttttaagcgcattgaattcggctagccgattcgtcgtcagacgactcttatgccgtaactctgccgataaatacccaatatggcttaagatcaccggcgtacctaccaaatttttctgtgtcagttgccgtttgatttcctgtggcgttaaatacggtgtttgttgcgccgttatcaacgtcccagtcgttaaaacggcatattccgatattaatagcaggtaggacgcttgttctgtcggtcttaaatgcgccgtttcattgcgaacagggacatgatacgtttgcgctagttctagaacaattgcatagatttcaggcgttaacgttgccacaaaatggtgcgatgtcaaatgcgtgagttgtaacccactcgccaaaaagcggtcaatctgcgcttgaaactcacgcttaacatcagtaatggccaactgttttggatgagtttgtaaggtttgataagcatgacaaaacccagccggggttaccaagctgggaatcgtcagtggctgactaattgggcggtctttgtcgaaaaccaagtgcaatcccattgccgtaatcccatgttgctgggcgagtgccgcactcatttcaaaatgaggcgatgtcacttgcgcattagtggtagaaatcacgccagtttttaagccagtaatgattgcgcgcgaaatcggtatggtcatcccgaaatcatcagattcaataatgattggttgcatcttaacccacctattctgccgctaagtcgaactgtccaacaatggtgtcagtcgtaactgttgttggtagtggctctgctggtgcaaaggtggcgttactgctgacgaccatgatagtcgttgccttttgggcggctgctagttgttgccagtcaatatcaacaatcgcttcgccagctttgacacgatcacccgcttcaacgtgcatcgtaaatggcgcgcccttcaattcaacggtatcaatccccatatgaatcagaatctcaacattttgttttgttgtaatcatgatggcgtgtttagtggggaaaatcgaactaacaacaccatcaattggtgcgctaatcgttgtttgccgttcatcaggggtaatggcaaagccatcgccaactgccttgcttgcaaatacttcatcggtaacttgttcaattggtaaataactgccagcaacgggggctgttacctgtccaactggtccttttttcaaaaaattaaacatcgttcttcctcttttcttaaacccgcatcatgatagcttcataaggtcgtaaagtgatttgctgaccatcaaactgcggttgttcgtaattatccatgagcacgtccttgacgtgtggtattgaacggacttgtgtttgaccagtaaaattagccatcacgcgaatcgtttcagtatctaggtgtcgttgataagtgtaaaccgcttcgtcctctggttcaaataattggtagtccccttcaattaaaactggcataagcttacgcattcgcactaattcttgatagaatgcaaagacactattgggttcatgaatcttagcggcaactgagtaatcatcgtgctcaaccggcattaaccatggtgtcccagtcgtaaacccgtgatgcgccgtttgatcccattgcatcggaattcgacagttctcgcgtaatttctgctgtaaaatcttaatcgctaacgcttcatcaatcccgtcgctcaacatttgctggtaagcattgatggattcagcatcttgatattggtcaacggtggtgaagttcgcgttcttcatcgcaatttcttccccttgataaatatacggtgtgccttgtaagccaaattcgactaatgctaataatttagcggattgatcgcggtattgaccgtcatccaagaagcgcgaaacggcacgcggctgatcatgatttgaccagaataatgcgttccaaccaccaccggcagccatccccgtttgccaatcactaagcacccgttttagatcagacagccgataatcgcctagtgtccatattttttgccaccggtataatcaaccttcacatgatggaaggtaaacgccatcgataactcttcacgggctggattggtataacgaatcgcttcatcaattggggttgaggaaagttccccaaccgtgacaaattggttcgggccaaagaccttttcgtacatttcatgaatgtattcgtgcacatgtggtccattcgtatagaaattgcgcccatcgtcgcttggcgttttaaacgtatcattcgggaagtctttatccttcgagatattgttaattacgtctaaccgtagcccatcaatcccaaggtctgcccagaattgcatcattttaaaaatctcggcccgcaagtgttcattccgccagttcaaatctggcatgctcttttcgtataggtgaagataatattgatcaagtactggcacatattcccaagcactgccactaaacttggataaccaattatttggttcgtgtccatccactggatcacgccacaaataataatcatggtacggattatccttgcctttgagactctcttggaaccagcggtgttgatcagaagtatggttgaccaccatatccatcatgattttaatcccacgtttgtgggcttcatttaagagtcgttcaaaatcggttaaatcaccaaaaatgggatcaatgtggtaatagtccgcaatatcataaccgttatcacgaccgggggaaacatacattggcgtcaaccaaatcaattcaatcccaagattttgtaaataatctaaccgttgaataatgccgttgatatccccgattccgtcaccgttggaatcttgaaagctccgcggataaatttgataaactgttgctttttgccaccatgccatgcgatatctctcctatttcagtcgtttattttgctgttcctggtttttgtggtttagccattgcttcaccagctgtcatttgatcgttataaccccaaacgagcgttacaataaatggcacaatcgttgcaaccgctgatgacgcgatgaaaatccataagtttgataaatctgctaggtgttttggatctaagaatgatgcaaagccgatccacgaccccgcgaaaccgaacatattaccgtggaataacccactgacaaatccgccagcggctgaaccaagtaaaccggcaatgaagacgcgtcggaacttcaagttgaccccataaatagcaggttctgtaaccccacagaatgctgaaatcgcaccagcaaatgataattcttttaaagctgttttacgggtcttaatcgcaacagctaaaacagcggccccttgtgcaatcattgttgtgcttaaaatcgcgttaaagtaactgtgacccgttgcggcaacatcgttggcaataattggtaaaatcccccagtgtaatccgaagataacaagcacttgatagaatccaccgattaataacccagataaccaaccactctttaataataagaattgaatcccgaatgctaaaccatttgataaccaaataatagcaggccctgtgatgtaaagcgtaatggcagaaacgactgcaatcacaatcaatggtgtaaagataatttgtaagtagcctggtaaccagcctttaacccatttggttaatttagcaaccaagccgcgagaatcattgggaaaatcgaatatgtgtagttgaccattgggaagtttaatgacccgatttcaagcaatgatttcccgtttaaagccactaattaaggatgcaccagaacaccaccgatgacagcggttaaaactggatcaccttttaatttcttagcggcagtgaacccaaccaacatgggtaagaagtagaaaacagaatcacccatcgtacttaagacaatgtacgcttcactcttagcacttaataacgcgccaagttgtggcatcgttagcatcgccaagacaccttttaaaatcccgccagcagctaagataccgacaatcggactcatcgcaccggtaatcacgccgattaattgattaaaggcttctttaacatggccccatggcgttaaattttgttggcgcgttgttgcagccacaacttgggccgtttcatcttcgccagcaaactctgtcccgatttctgcaatcacggcatcataaacggcagtgacttggttgccaatgaccacttggtattgcccagaggccttttgaacgttaatgaccccatctaatgctttaatttcttcggtcttcgcttttgattcgtcctttagataaaaacgaagccgtgtaatacagtgaattaaactatcgatattttctttacccccgacaccggcgacaattgcctgtgcgagttgtgaataatccttttgagccataataattcctcccgaatcttattgaattaaaagtagcatgaataaaagcgctttctcagtacgccgtaatcatatatcatgtacgtacaagttttcaacactttttaaaaccgttttcttgttagcgcttaatctaaccttgcaacttcaccgaatccccgttatgataggaatgagaaaacaaattggagaatatcgaatggctaaaaaatatgaaatgatttatcgagatctcgtgcgcaagattacgcaccaactctatcaaagcggcactttcttaccaagtgaaaatgaactcactgaactctacggtgcgtcgcgtgaaaccgtccgcaaagcattaggtagtctacttgaaaatggctttatccataaaattaaagggaaaggctctttggttctcggtctagacaagtatgcttttccgatttcaggattgaccagttatcgtgaattagatagtcttttcgatatgcatactgacactcaagtcttgcaattaacacagacgaccgttccccaaacccttttccatcttgaatccgaagagcagttacctgccacttacattcaacggctgcgcgtcgttaacggtcagcccctggtaatcgataacgactacgtcttaactagcatagtcccccacatttcaaaaggggttgcacaagactcactctatcgttactttgaagaaacactcaaactcgaaattgggtatggcagtaaggagttcacggtgattcccgccactgaagaacagtgtcagatactgaacctaccgcctaacagctccgtagtcagtgttaaaggtgtcacccatctacaagataataccctccttcaattcaccgaatcgattcaccgtgccgataagtttaaatttatcgaacatgctcggcgtaaaattatctagtcaaaaaaaacgacacccaccggctgagagttgccagatgggtgtcgtttttttatttgactgcctgtgttttaaaaacagcgatttgatttaaaagttcactaatgcgtattcgatcactcttttgttgttgacggctcgttgtgagtttctgatataagtttaactcatcaccctcgttgaaggcggtgaccatggcttcagcggacgagacgtaatcagtcattactaattgtaactgacggttaatttctcgtaattcttttggcggatttagtaatgtggcttgatcaataaattgtttaaaaacccgtaagttacgttgaaaatattcgtttaacgattccaaattttcgtccaccagacagcgccctttgatgatgttcttgctggtccgggtgtactcactaaatactgtttcaaacacgataaaccgttctaaaaattgattccaccgtacgatgtattcctgagtcgatagttgatccgctttgacactcatggtcgttccccctttaatataatatctaaatactcatcatgagtataaatatatactaagtatagataaaaggctaattattagcctttgttaccgataacgatttcaaattgcgtttcattttacaaataaaacatgacgtcctatagttaaggtaagccaaaaaaaggatctgattacttgtccaaccaacgttatctatctggaacagcactaaaactatttacattcaccctactaaccggcacgttcacaatgtctatcagccaatctgccctttcaactgcttatccaaccttaatggcctattttgatttatcagccacaactgttcaatggctgacaaccggttttatgctcgtaatgtgtgtcatgatgccgattagtccttggttattaaacaacatcccattcaaacgactctacatggggattttaagtttatttactattggaacgctattaattgtcttcgctaatcagttcggttgggtattgttcgggcgggcgttggaagccatcgcagtaggtgttttatttccatcgtttcaaactgtcttattaaccattactgctgaaaatcaacggggccaaattatgggcctggctggtttagtaatgggctctgcactagcttgtgggccgattatttcagggattattctcaactacttcagctggcgaggactattcatcgcctttattctgattatcttaaccgtgttagcaacagctaacttcactatttctgatattatgccggctaagccctatcaccttgatggtctttccgttttatgtacaactggattaatcggtttattatatgtcatcagtagcgctaatcatcctactatcaacccaatcggactctggggtatcggattagtgagctgcctagcactgggttattttgtctaccggcaactcacccagacaacgccacttcttaatttacatattctcggttaccttaactacgatattgcggtcggattgactgctatttcctatatttcattgattgtcaccacagtcatctacccattatattttcaagctcaattgaagttgacgccgcttctttcaggattagcattggtccctgctgccgttgtgttaagccttttgaatccactcgcgggccggttagctgataaaattggctttaaaccgaccttactcgttggcctaaccatgattagcattggatggctagctttgattggcttctaccaatggctgtcattaccattgatgatcctgtgtgcctgtttcatcgaaggcggcaacgcatttgtcatgatgcctgctgttacacttggtgctaatagcctgccggatcaagtgctcgctgacggaactgccgtcacaaccacgattcgtcaaattgcgggcgcgctgggcgtcacccttgcaactctccttttaagtgtcgccggttaccaagtcgtatttgttagtttgctcggcctgaccttaattggtctcggcttagccactcaactacaccccaaataagccacaataaaaagcaggttagcgatgatgattgtcatcgttaacctgcttttttaatgccagcgttgcttaattaagataagtccccatgtcattaaactaaatgttgaaatgatcgcgccgataattagtcccggcgcacgatagactaagcgaacttggttagtccctttctcaagtggcactgcaagcatattgcccatcactcgtcgtgtacgaactgtttgatgattgacttgcgcatgccaaccactgtcatacggcacacttagataaagtaattgatcagcggtcttagctggtactacaccagcaatccgaccattatctgccgacagttgttttaggtcgatctttaagcgttgttgtgccaactgatcaaaagcttgatcgaaatgaacctggtctaaactagccacctgaatcttacgaaaggctttaggttgccgactggtaattgtcagcgttagttgttgccctttttgatagcgacccaaaccaataatcgtggtcccattcaattcaatcggtgctttatgtgttcggccattaattttcactttgagctttgataagttttgttgcggcaagtatagataagcatatccacttgtcttaacttgcgttgtaaacgtaatttgccgacgtttttgcgcttgtaaatctaattgattatattgataaaatggtgtcgtttgccccgtcatcgcctgcataattcgatcttgattttcaaacggttcatgtgcttttaaagccacgtgtgctagctggtcattaaccgcaaaccctaagcctaacgttttatggggttgtgtcacaacctgtccttgcttagcaattaggtcatattgattggcaaatagcagatcagtcagcacagtatgcccaatcccgttaatccgccgggcattcttactataaaaaccgagattaaccaacatcgtccgcatccgctcatcaagtgtcgaagaataattgttcaatgtatactgtccaaaggtcaacgcatcattgtacccataatacggttccttaaacgctttttttaagagaatcgcttggttattaacgcgatagaaatcaggtgtttgccgttcaagctgttcaaagagtgctgcttggcgttggtattgttgcgcataaacaacttgatcgcccatcggtaacttagtggtcgtcaagcggccattaatcaccagttcactaaacgtcaatacggttcccagaccaatcacccatggttgccaacgtgctcctttttgccacgctgcaaaaataacgctagccaaaaccattagtccgattaacaaccagagcgattgtttctgcacaccacgtacatgtggcccatagtagagcgccaactggccaatgctgagcaagccaccgactatcaaaataaccaggcgtttcgtttgacgtttaccgattggttcaatacttgcttcataggcaattttgatgagaacaaatgccatcaaataggtattccgatatggaaacccttctggttgctggaacatgtgccacatcgtattaaatgtcgttacccagaaacttaacgctaaactaacaattaaaaagccgttcgaccactttgcttgccgtcgaatggttggtagacagaaataatagaccgcaaataacagcgctaatgtactgataaataaagttggttcatgaattaagcgttgcgtataatggctgccgccgacttgaaattggctcaaaacttcccagccaaactgcggggttggataaaaactggttgcagcgattgtctttttcccagtcttcaacattccaagtaacgacggcaataatacaactgctgttgtgccccccgcaatcaatgacgcccaacaaaactgccagatagcctgccgccagtgaaccactagttgccaccaagactgttggggttgtttccatttgattaacaaactaattgcatacaaaacggcaaatagacatgacatataacccaagtaatagttggtaaagatagtggcaaccaacatccagatatataagccaggacgcccttttaaaaatagccgttctaatcctaagatgaccagtgggaggaaaatcagagcgtctaaccacattaggttataaaagttcattgccacaaagccacttaaactataagctgttgcaaaaattagcgcggaaaaatgatattcaggctgacgcgtctttagaaaatgggccatcgttaaacccattgccccaatcttcaaaataatgacatacccaaccaccactggcaactggctattcgaccaaaataggagcagtaaattaaaaggactgattaaataataagccgctagcggtaatatatcgccacccagtgaaagtgaaaatgaatacgtactgaaattcatctgggccatttgccgtttaaactctgccaaaaagggcatatattgggtaccgagatcactaatcaataaattatgccgtccaaacggcacaatttggagcattgcatatagccccaccattaataacatgggaactagcacactcaataaatagtaactgacagctgttttatttgttctcttcatctgactcacttcttttgccttttctatagaataatacacactctaaacaaaataagccacccagacaatttgtctaggtgacttattagtaagttgcttacttcatcataccgagggtgaccccaccgacaatgactaataaacagccaagtgtgacgtaaaccatttcttttttcgttttttgttcacccaataggtaaatactaccgattgttgagatgataatgccacattgtgataatgaatagctaattgctagaccaatatcattcattgaaatcaacataaataagttcccaagaccccataataaaccagtactaatgttgagtgctgttttcttattgaagaccgctgtcccaatgccaacaccggcaaagattgcagcaccgacgaacatcccaattgcttgtggtaaaacaattgatgttgcgccaatgtgtgaccagttaacgatgattgtgtaaccaccataaccgattgttgataagattaatgctctaaaaccacgtgcaaattgtgtatcttctttagcagcaacactgctcttcggatccttcattgaagttaacgtggcaccagcgattaagatcactaatgcagtaatcccgaagatgtaatcgtgcgttgtcttccattcatggaataacaaagctcctgctaaagtgtttacaatcagttgcatcccggttgataatgggactgtcttagaaacacccatcgcttgcattgattggaactgttgtccttgaccaatgctccagaataaaccggaaatgataccgattaccataatccgtaagtttaaagcgggttgtaatactaaaaaggtaccgattccaaaaaccagcgcaccaattgtcattcctaaggtttgttgataggcattcccgccaagtttgccactcactaacccgatactaccccatgcaagtgcagggattaatgcaattaaaatagccatttataaattcctcttcttctctaaagtacaagaatccattatacatagttttatatccgctggctagtaggaaaacggcaccattcaatcgttaccagccttcactaccgtcatgtaagcaactgtcccagtcgtgattgcgcttacgtaaattttacgtaaaaaagcgttttttttagtaaaaaaatcaacgataagcgttttcttaccgttgataaccttaatgttttcgctttgcatgttgtaggacttgatataacaggacgccaatcatcacccctaatgtattaaacatgagatcatcaatatctgccatgccagtccctaaaacaaactgggcggattcaatacacagggataacagagccccttcaataatcgtaatcaaccaatcccctttgcgctgtgtcaatgaccgtcgcaataaaccaaacgggataaaccacgcaatgttcccgtagaagttataccaataatcaatctgggcgggcgcttgccgtaacttgaaagtctcaacaaacggtgtcaaattaatttggctaagtggtcgttgcaaatggagctgcatttgccacggataataaatatgccgtaaaaccgttaatgagaccaataaggcaatataaaacacaaataacaatagtttcagttctgggagaagctgtattttgcgtcgtttcattaataagtaccctaaccggcacacaataaaaaccaaacaatacaaaatcgtcttatctaaactctccaccgtcaatttgatgagtggtaaatgattatactgttccccccaagggaggatccattgttcataaatacgcccaagaaataccaaaaaaccaacctcacttattccactaatttaacctatctgttcattattcaatgagtaattaagtccattatagctgttttttttcaataaataacgcttaattactcgactaaagtgaatcttaaactattaggtatcgactgcccaactttagcccgatgtgtgcctactgtgctatgctataatagaaattactataacttgaaacaggagccttttatgaaagttctattatattttgaaagtgaaaaactactcgctaaatctggaattgggcgggcgttggatcatcaaaaacgcgcgttaaccgaaatggggattgactatacgcttgatccgaatgatcaagattacgatatcttacatatcaatacatacggactcaaaagccgcagtgtcatcaaaaaggcgcgtaaaatggggaaacccgtcatttatcatgcacattcgaccgaagaagattttcgcaactcctttgttggttccaatcaactcgctccatttgttaaacggtacctcgttagcctctatcaacaagccgaccacttaattacccccaccccttattcaaaatcattattggaaagctatggtctaaccaaccctatcgctcccatttcaaacggcattgatttagctaagtatcaagccacaccagctaaagaagctgcttttcggaatttcttccatttaaagcctgatcaaaaagtgattatctgcgtcggcctcttctttaaacgcaaagggattctcgattttgtcgaaatcgccaaaggtctacccgaatacacctttatctggtttggagatgtacccatgtacagtattccagccaatattcgccggattgtcaaacaggatcatcccgacaacgtcatcttccctggttatatcaaaggcgatattatcgaaggtgcgtatgccaatgctgacttatttttcttcccttcttatgaagagactgaagggattgtcgtcttagaagcccttgcaagtcatcaaaaagtattggtgcgcgatattccggtttaccatggctggcttgccgatcaacaaaactgctacatgggccacactaacgcagaattcagtcaactcatccaagcaatggtcactaatgccgttcccgatttaacagctcaaggctaccaaactgcgcagtctaagagtattacagaaatcggccatgaattacaagccgtttatcaacatgttttggcgccagatcaactgaatccaaagtacgatgccatcatgcggcccgcgaaacgttaagtttctgtttaaactttaaactgctatttgcgctaatgccgccctcgggttaaaataaggcattagcgctcttttagttctgttttttgaaaggatgtcacattatttgaaactcacaaaaattaaatcattcctatccacgagattaggcttcatgagtttgttagtctttttattttggctaaaaacgttattcgggtacttcaccgattttaacctcgcagctagtggcttcttacaaattgctattttaatctttaatccggtcgcgacgacgctccttttattcggcatcattctttatgttcgccagccgcatctcagttattggttgggcttgattatctatgccgccaacaccgctcttttatattttaatgtcatctattaccggcaattcaccgattacatgaccatcaacaccatcttagggtattcaaaagtttcggctgggctcagcaaaagttcactggccctcatgaactggcatgatgcgctgtattggattgatattattgtcttagccttgctgattttaaccaaggtcatcaagatcgacaaacacgcatttaatcggtggtgggccttcagtattacctcattggccgtcttattatttggcatcaaccttggcttaagtgaaatcagccgacctcaaattttatcacggacgtttgatcggaactacatcgttaagtacctcggcatcgacaccttcaccgtctacgatgctttcaagactactcagaataatcaagtgcgtgcccaagctgagagttacgacttagatccggtgctcgactttatgaaagagcattacgctgcaccgaacgctgaatacgcaggcgttgcgaagggcaagaacgtcattgtcattcatttagagagttttcaacaattcctaatcgactttaagttcgaaggccgcgaagtaacgccatttttaaatagcctctatcatgatcaaaatacattaggttttgaaaacttcttccatcaagttggccaaggtaaaaccagtgatgccgaaaacatgatggaaaccggcgtctacggtctaccacaaggctcagtctttacaacgcttggttcggataacaccttccaagctgccccatcaatcctcaagcaaaacggtgactatacgagtgccgttttccatggtaatgtgggcaccttctggaaccgcaataacgtctacaagaactttggctacaactacttcttcgattcttcctactttaacaccgatcctgataacgtcttacaatacggcttgaaggacaaattattattcggtgaatcgattaagtatctcgaacagctacaacagccgttctacacgaaattcatcaccgtcaccaaccattttccattcccattacccgaaaaagacggtgacttcccccgtgccacaactgataatacagcggtcaacaactattttgcgaccgcccattatcttgaccaatccctagaagagttcttcaattatcttaaagcctctgggctctatgataattcaatgattgtcctctatggtgatcactacggtctttcgaattctgataataaggccttactcagtgtactaggccgcgacccagaaacgtggaccgactacgataacgcccaactacagcgtgtgccttacatgattcacatgaacggtttaaaaggcggtatccaaaaacaatatggtggcgaaatcgatgcgttaccaacaatgcttcacttactcgggattgataataaaaattacgtccaattcggcaccgatttattatcaccacaacatgatcaagtcgtggctttccgaaaccataactttgtcacccctgattacacagtactcgatggcaccatctacaataatcaggatgggacagaagtaactgaaccaacagctaggttgcaaaaacaagtcgctgcttggcagaaacaagtgaaccacgaattgagtttgtcggattcagttaacgaaaagaacctattacgtttctatacaccacaaagttttaaaccagtgaaccctgccgattataactatctgactggctatcaacagcttgtcgatattcaaaataaattaggggctaattcaaccagtttattctcgcaaaatggtgatcaatcgactgttgggctctttaaaaccgatgctccagaattagcgggtgatcaatcaagcctcacggaagtgccaaaatcaaaggccctgaaaaaagagtctgatgcaacaacaactagcgatacggaataatcgtcaaaaaaaaacgcaaggacaacatatattgtccttgcgtttttttgacgttagctaatcacctgcgattgaaaactattaaaaacggattcctgagtcgttgtcatgattacgataatttgaaactgcgctgctaccgctctgacatcatttaataattggcgagcatccgttggtggaagttcatctaagaaatgcttgaccaccacgagttgctggtggcttgctaaaccgcgaatcaattgaatccagaactgatcgactggcggtaattcggtgcccaataaactccgactgcgctttaaatgctgttcaatcaacatttttaacgttggtgcaagctgctttttaggaagcaacaagttatcccaaccggacataaagggtagaatcttaggcgcctcataatcaatgacatatgggggttcaggtgattcaaggctctgatgaatcatctccggttgactaaaatagacctgtccaagtgctaagggttgtttatttagcatttcaatcacgcctttctcattttcctaaagcgagtaacttggcaccaaccaataatgtagactggtgcaattagactgataaatggtgcccatagttgggcgaatacttgattggttaaattctgcttggtgctctcatgcaaaatcggattcaataacgaatgactactaaagtcagtcagatgatttttaaataacggttgaaatgctcggggaccttgtattggtcgcaacggcttttgtagccactgttgattaatcagctctaatccgcgccaatagtaggaattgactaataaccaacctaaaatcactgtcacgcttgcgctgattagtaagcaaagcgccgttaacgtataataattgacaattgtatgtcgcgaccaattcgcactagtgaaagtatcgatatcctgacgcatcttcttaaacgcttgccaagtcaaaataccaatcacaagtgcgataacgatagtcagcactaccgcgataaattgatagcgtcccagtaagacttctttactttgaaccagatgtgtcagggggttagtcccctctttagttgtgttaaagttggctaattgctttttcaactggttgaggtcatgtcgttctaaactgatcaagctcagcgcaatcagcatgacgcctaaaaagaggcaatccacgagatagattaacaaagattggcgtaaataataccgaatattagctggaattgatttaatgaagaacatgacccacctcctaataaagatagtgtaaaactaaagtatgaaaattatatgaactctgtggtaaaaattaaaaaaaacgccttaattaagacgtttttttagttcccttaaattgtcttttcttttctttgaatcattaaccaataaacaagtgctgtcagccccattgcgataaacgttgcccccgtataagcgtgaataatcgcgaattgatttaagaccaagtagctgaccaccccaatgacccatgcaatcatggctgtcagatgatatcctttggtgtaccagtatggtccagcaacttcattgagcgcaccaacattgtagtgccaccgtctaataatgaagtaatccaccaagaaaactgcgatttcaggtcctaagaacatcccaatactatcaaggaaggtttcgaaagtggttaaaaatgaggcaacatagaccgggataaaggtcatcaccgttgccaataacgtcacgacccacaatgccggcgttaatttaaatttcggaaaaatattggttaaagccgatcccgcagccattagattcaccgcattagctgtcgtactggtaatcacgatcactaataacgctaaaacacctaaccctaatttggccgcaatggtgcttggatccgcgttgttcgggtcaaaatgatttaacgtaatcgctgtggcaattgtcgccgttaacccgatgaaagcaaaccagaacaggccaatattggcgcctaagaatgaatagcctgtggctgctttcttgttctttgaaaaacgactgaagtccgcagcagcggttacccatgcaaggttaaacgctgctaggatatcgaccgccttcccaaattcaagccgtaagttgctggctggtcgccacgccaataagtctttgaacggtaccattttgaagacaatgattgattcccaagtgactaagataatcactaagatgatgccaattcgttcaatccagcggacggatttttcaccgagcgaaatactgattaaatgcaggacagacataattagaatcccaacaatcaagctcatccggttagtggctgcatcgttgcctgaccagcccatgatttccttgatgatgaagctcactgaagttgctgcaatatacgtattcaccgcagcccaaccgatgaattgtaccacattgataatcgatggcaagacggatcccttcacgccaaatgaggcccgcgttagccccatcgcccccacaccagtttgataccccatgtaggaggccagtgcaagcaagacgtacgataaacagccaacaactagtaacaacgtagacccttgaatcaagccagttgccgcaataatgccgccgataaaccaagtgccgttattcgcatttgcaccaatccaagttgcgaacaaatcccaactgcccatcgttcgtgcgtccttggatactgcatgaattgtttgttgctttgtcattttgataccctccacttggttaattgcattaaaaaaagacctactcctagacagagcaggtccactaatgtacttgttaaccgctcctttgtcagcctcactggactgcccttaaaaggatttatatttataagcattgtattaaacttacttgccaaagtcaactcatgattgttatactcactaataaaaaaagcgaggttggataaaatgctcattcaaaacgtgcacattgagaatcaagaatcattgcagtcaatcagaattgaaaacgggatcattacagcaattgaggcacagctaataccgcatcctaatgagcaagtcatcgacggacatggtcaattggcattaccgccatttgttgatcctcacgtccatctcgattcaactctcaccgccggccagcctgaatggaatgaatctggaaccttgtttgatggcattcggatttggtccgaacgcaaaaaggatttaacccacgacgacgtcaaacaccgcgcaattcaagcactaaaattacaggccagccatgggattcaattcgtccgctcacacgttgacgtgactgatccagacttagttgcgctcaaagccttaatcgaggttcgcgaagaagtcaaggattggatgacgttgcaactggtagcctttcctcaagaagggattctttcttttccaaatggcaaagcattaatgaccaaagctgcccaattaggggttgatgcaatcggtgctattccacatttcgaatttaatcgcgaatatgccgtcgaatccttgaagtttgcttttgaactcgctcaagaatatgatttactattcgacgcacataccgatgaaattgatgatcccaattcacgtagtcttgaaacagtcgcgactctcgcccttgaaacggggatgaaagacaaagtgacggcttcacacacaactgccatgggctgttacaacgatgcctatatgtacaaattgatgcggctgttaaaaatggcggatttaaacttcatcgccaacccacttgtcaacctatttctcggtggccgttttgacacttatccgaagcgccgtggtttgacgcgcgtaaaagaactgactgccaacgggctaaacgtcgcttttggtgaagatgatattcaagatccatggtacccaatgggcgatggcaacatgcttgatgtgttgtatagtggcctactggcaacccaaatcatgggccatactgaaatcatgaatgcctatcgcttcattacttacaatggtgctcgtgcaatgcacgtccttgaccaatatggtctcgaagtgggtaaacccgcccacctgattctaatggatagcgacaacttctacgaggctctcaacaagcgcgccgctgttaccctctcaatgcacgctggcgaaatcatcagtgaaacccaaccagctcaaacgcaattgcatatttaatctaaaaaataggcgtcacgacaatttaatccttgtcgtgacgcctatttaaattggtttagctttcacttgtcacaatcgtttcatctgggaaagttaaggtaaaagtggtcccttgttcaggaatactttggacctcaatcgtcccataatgtaactggacgagttggtggacaatcgccaaccctaaaccagattcaccatatttggtattcttacgtgatggatctgctttgtaataccgttcccaaatatttttgacttgttcgtccgtcattccgataccggtatcgctaatcgttaagattgtttcgtggaaaccagcttccgcagtcaccgtaatttgcccattttctgtaaactgaatggcattttgcatgatgttaaacatcacttggacaaaacggtcatagtcggcatagattgggacattctcttgggcgtccaagatgagcgtatcaccggcttcagtcgccttcttctcgagttgctcttgaatattctggatagcttccaccgcattaaacgtttgcgggttcaatttaatttggttagtccgaatcttttcataatccaggttctcgttgactaagcgaatgagtcggttggtttcattttgcattaatgaaatactcttggcgcgcatctcttctggaatcgcatcatattgcaacccttctaacagacccttaacggtcgttaaaggcgtccgcatttcgtgagcagcgtcggccatgaattgccgccggcgatcttcttgccgcttaatttcctcttcagattcattcaacgaatgcaccatctcattaaaatcggtggccaaatcatccaattcatctttaccaggattcttaatctgaacattaaaatctccttcagcaactaggtgggtcgcatttcgtaagcgattaatccgataaatttgataccgtgctaagacgtaactcaacagaatcccaccgattgtcgatagtaaaaaggcaatcaagaggttcttgcgcatcgttgtcaaaccagatttaacggtttgtagtggtgctgccaccccaatcacgtaaatcagtttgttattgtaaaaaacgggtttgaagaccactaactgttcttgcttattgttattcacttggtgcgaatcacgacttaagctcagccgttgaatctggccattctttaaatgtttccaatattgtttcttgaccgaaactttaggatccggggtaggatacaccatctcgttttcggcgttaaagaaattaaacccaacgtgttgttgggaaaggatttgttgactatcaataatgaattgggtcgacaaggccgcttgagacccctgtttgaaagcttcacgttcaatcacatccgcgtaaccttctagttgatcccaggtgctctcataagcggtccttgtcgaatattgcgtaaacgcaatccccacaataataatggtcgtcataatgacgccgaaaaatgccaacatccattgataaataagcttcattcgcgcgctgcgtctgaatcatcaaatttataaccgacaccccaaacggtctgaatcacttgtggtcctactttttcaatcttttgacgtaacttcttgatatgcgcatcaactgttcgttcgtcaccgaagtattggtaatcccacacaagttctaataattgttcccgtgagaaaacttgacggggatttttagctaacgtcttcaataaatcgaattcttttggcgttaaatctaaaattggtttgtccaataaataagtctcacgcgttttagaactcaacttaaagtgtgttgtttgtacatcaaaatctgaattttcagccgcttgttgtaagttttcttcagctgcttcgacttgttcatcaatcaactcagcacggcgatgtaaggctttaatccgtgcaatcagtgtgattggactaaagggttttgtcacataatcatcagcaccgagttcaaggccaagcacttgatcactttcagaatcgcgcgccgtcaacataataattggtactgtcttcgacaactcgcggattttttgggcgacttgcattccgtctaaacccggtaaatttaaatcaagcgtgataatgtcccaactctctggatcgacactaaaggcttccactgcttcattgccgtcgtaagcgaaatgggcatcccaagcttctttttggaaaaacatactcatcatttctgatacggatttgttatcttctaccattaaaattttcattagaattccttctctttttacgttgctatgtctatattatacagtagataaaccaattacggatgaataatatatgaagaagtgatgaaaatcaaacgcatcacggttcccgtttgcatggtatcgctaagcatgatagcatgttaagcagatatcattatttaggaggccccattttgacttataaaggactagtatttttcgaccttgacggtacactttacaacgaacattctgaagtagatgcagctgttgcgattgcactccaccaattacgcgccaacaactacctaccaatcattgcgaccggtcgctcaccgcttgaaattcaagatgcacttgcaaaaaccggcatcgattcattcatttgtttaaatgggagcttcattcaatatgaaggtcaacctgtttataaaggcactattccaacgcccgtgattgaaaaaaccgtcgcaattgctaatgctgctgacgaagccatcgctttttataatgaagaagcaatccggattacggctgtaactcaacccggcaaagatgcctacaagtttgtcaacgcccccgtccccgaagttgatccagactattacttgaatcatccagtctacatgatgttgattctaacaaacgacaatgacaaggcctatacagaaacactaagtaccgacttaacattctaccgcaacacaccgaactcaattgatacggttgaaaaagattgttcaaaacaaaccggtattaaagaattgattcgctcacaaaacttaacggacatcccaacttatgcgtttggcgatggtacaaacgacttaccaatgctcgacttcgtagactatcccaccgttatgggcaatggtattccggaagctaaagccaaggctaaatacattacttctaagaatactgaaggtggcattattgaaggtttacgccactggggcttaatttaatcacttaactaatccgcgccatgacggctcaatcactgtcatggcgctttttttatcttgacacttctcagtagaccgattaaaattagaaccatctcacttaaaaaggagttactaatgacacaacattcactctttgccaaaaaacaaatcgacgtgaaccaatttaaaaacagtacactagaacgccatttaaccgcctttggtttaaccgccatgggggttggtgcagtcgtcggcgccggtatttttatcacaccagggattatcgccgctaaatatgctggacccggtgcgatgctgtcttacctgctcgccgcagtcgtctgtgcaatggctgccctttgttattcagaattcgcttctacaattcccttggccggtagtgcctacacatacgtctacaccgtcttcggtgaattaatcgcgtggattctaggttgggcacttatttccgaatatctcttcgcagtcgcctcagtggccgtcagttggtcagcctacttccaaaatctaattgctggctttggattacacttacctaccttcttatcgactgcatggacgcctggccaccctggtggtattaatttaattgccggtttaattacgttattgattgggttcttactatcaaatggcttacgcgaatcaacacggattaatacgattatggttggtgtgaaagtcgctgtcatcgtaattttccttggcgttgccattttctatgtgaaaccagccaacttcaaaccgttcttaccatttggtgctggtggcattctttctggggcagcattagcattttacgcctacatcggctttgatgccgtttcaaccgcatcagaagaagttgtcaatccgcaacgtgatatgccaatcgggattatcgcttcattattgattgcttcattattgtatgccgcagttgccaccgtcctcgttggcgtcgtgcactatacaaaactcaacgttggtgaccccgttgcttttgcgcttcaattgatgcatcaaaactgggttgctgggattgttgccctgggagcagttgccggtatgacaactgtcctactcgttatgacctacggcggaacacgtctgatcttcgccattagtcgcgatgggctattgccacccgtttttgccaaagtcagttcaaaaacacatgtgccagttgcgaatacatggattttcgccatcgtcacaagcatcgtcgcaatggtagtgccacttgataagattgctgaattggtcaacattggcacgttattcgcctttgcaactgtttctctcggtgtgatcttcctgcgcaagttaccattttataatgaattgccacaagggtttaaagtgccactattcccatggattcctttactttcatgcggcttatgcttactactcatgacccagttacaactaacaacttggattgtcttcttaatctggttggtgattggcctaacaatttacttcagttacggctaccgtcacagtcgccaataaaaaataggcgttaagcagttttcataatctgcttaacgcctatttctatgcaatctatcgtgaactatctacaaaaatgcatgaacatccgtgaaaatgaggtcatgttgccagcaagaatcgcgacaattggcactaatgcccacaaccagtacttattattcttccgctgttcaacctcagctttcaaccgtaaattctcattgtggttaggattgattgcaccgttacgcaagtatgctttgaactggcggtatattggtgcgaagacttcgatatcattttcgttgagcatttctttagggaaatagaagcgttcatcgccgctaaaacggcctgagatggcggctaccaagtcacttaatgatgataactcttcaagttgaccatcagattgtataatttcaatctgagttttgggtgatttagcggagggatcataggcgtcatacggcaaatcgaaactgttattaacagcagtgtaatactcactgttataaccagcttgctcggttagcgcccgtaattctggtaaaacacgttgggtctgttggctaaaggcaaccgatttgagtgggcggcggcttaaaaagcggtcggccaaatcattgagcactgaatccggatagtctaaccagtatagaaaataggtattcaaaacgccatcatctaattttaaatagtcttgtagggtgaagttctgttcgaaaaatggaatcaataattgcggtgcgagactctgatgatggtcaggctgttgataaagaactttcgcacgttgcaagagcttttgcaagacaacttccatgccgcgtgaaacaggatggaaataaacttgttgatacatctggaaccgactgacgatgtaatcttcaacggcatgcatcccgtttgctaaaaaggtaatgcccttatcgtaaggccgcatgactcgtaaaacacgcgtcaaatcgaattctccgtatttagtcccagtattgtaagcatcccgtaataagtaatccatgcgatcagcatcaatctggctggaaatcatctggacaacttgtggattcggataagaatgatcgattacactagcgactttcgcagggaaatcatccgcaacttgggttaagacgcgattaatggctgtctccgggttggtgataatttggcgcgtaatcaattcatgatcagtattgaagatgtgttcgaaggtatgtgaataagcgccatggccgatgtcgtgcaataaagccgcacataaggcgactaaccgttcatcatcgttccaaagtccatcaccggcaacttgactagggtagttaagttggaattgatcacagatttggcgtgtgatttcataaacacctaatgagtgggtgaagcgggaatgttcagcgccttggaaaacagaggaagtcgtgccaagctgtttaatccgccgaagacgttgaaattcgggggtgtcaattaaatcgagaatcacttgatactcgacgcgaatgtagttatgcacaggatcacggaatactttttcacgcgatagtttaatagcggtgttagtcacaatataatctcctttttgaggcccgttaaacttgataacggtggagtgctgtttggtttttaagtagaagttgttgataagctttcgtttgtaattgtggtgtgaggtcaactagttgtggttgttgaaccaaccggctaaaagcggtctgtaggtgcgtaatggctgttgcaacagtcattggtacgtttaacagatcagataggttggccatggtgtccgggatgaccgctgggaaagtccaccgcgtttggctttgtgcttggccagcagtgtaaaagctatgcatgagtttgccacgtgcctgttgattgcctgtaatgctggcgtataagagtacggtaattccgtttttggcacggcgttgggcaataccggcaaacttttgaccattgatgctgagatcgtattcgccagggcaataggagtgagtgacttcgaaatggtcaatcgtgacgggatagtctgcaaaggcagttgtgaacaattggtgcatgagcgcgtaagcggcattaatgcttaggtgatccgccatatcaggaagatagaagctgacgttcaaaacgccggcatccgtcacaatccccaaaccaccagcgttacgcacgaaatgggcatagtgtgcagcctctaatgtggcaaccgcttgtggataagcaggtaactttgtatccatcatgcccaaaataacattgtcagcaagcgtccaaaaatgaataataggttgttgtaattcgcggctcaaagctaagaggctattagcatgagcaaaagcgagtggtccagccgctttttcaaaatgttgggttaaaatagcccattcttgattggcagataaagtcgctaaatcatccatggtaatcacctccgaaaattaaaaactcttcttaattatagcgtaaattctaggcgctgtctgcaatcggtacgttggtcaaagagaattggcggattattctggcgctcaaattttgaatggcttataatagaactacttaattaaaattaaaggaagttatttatggcaagtcaaagcggaattccggtcaaggtacaccttgaaacgcaaattcaacaagatgggcaacttgaaaaacacgttttcgatgaggatggtcaagttgtcaaaatgggagagtcactttacttacgttatctggaacacggtggtgaacaagccaccgcggtacggtttaaattggctgctgacggtcaaattcaattaacgcggggcacagaagaagacgagacgcaattgcggttgtactttaagcaaggcgaagacctcggatcaatttaccaaacaaaatatggcaacatgccagtgctcacaacgacaacccatttattatcgatggtgaaggaacaaccgttatcaggtgaaattacggttcattaccaacttgccatcaataatcaagccgtgggggattacaaattacgattgatttttacagcttaagctagtatgattaaggatagactgttgaaaggacgtgtactggttgaaattagacgtttttaaaggccaaaataaagaagaactatcaatgattgaagtcgcacatgcaattttagaagaaaaaggcgacacgattgcattcgctgacttaacgaatgaaattcaaaactatttaggcaaaagtgatgaagaagtgcgtgcacgcttatcacaattttatacggatttaaatgaagatggtagtttcatttctttaggcgaaaacgtttggggcctccgttcttggtacccatatgaatctgtcgatgaagaagttaaccatccagaagatgaagaagaccaaccaactaagaagaaacgtcgtaagaaggttaatgcattcttagcagatgttaccgacgatgacgatgtgattgattacagtgacgatgatccagaagacgaagacttagatgctgatgatgatgttgatttagcagctacagatgacgttgctggtgatgacttaactgaatacaaagctgacttacaaaacatcggtgacgatgacgatgatgaagacgacgatgccttagaagacggtatcgaaggtcaattatctgaatttagcgatgatgatgaagacgacgaagacgaagatgacgagctttaattagacgtttccgattcgttgccataaaaaaagacgccaaagttaactttggcgtcttttttttgcgtttaatatttttaagctaatcctcgtcggatacccgacttacgacacactctcgttcaagaaaatggtaaaccgcgccgattaagttggcgtcttggttgaagtgacaaatttcgatgtgtggcacaggaataggggtggttgcccctgcacggcgttgccagtaacgattaatactactattgtcatcggctaaaagtgcgtcaatcgcagcgtttaattttggtagtaggtcagttcgctgactaatgccaccaccgacaccaataatctcgggcgtgtaagcaacgtttaaaaagagcatgatttccgcaagggcagcatacatctgtgtgacttcttgggtggcaatcggatccccttgatcggcaagttcgaagacggttttgccatcgattgtattggggagtttaaaattacggagggagacagtcttgccaatttggacgggtgagacttttgaattgttgagtgttttaatggcatctgcgatgaatttttcgaagttatcgattttatcagcagtggttttgagaatggtcccattttcgataatggataagccaatcccagaaccaattattgtgaataaggcgctcagatgaccttgaccaatcccagctgtcatctcggcgagtgctgcactgtcggcatcattttggagagagacgggcagaccaaggcgcgttgcaaattcagtttgaaattcaccgaggtgcaaaaatggcacataactcatgccatggatgatgccagtctgttcatctggatcgccaggacaactcaccgcaattccagttaaatgaaagtcggtcgcaaattgatcacgtaattgttcaacttcggaatagaagcgattgcgtgttagcggtgtagggaattgcgcttggttaattagttggtgtttcgtccaaatcccatatttgacggcaaaaccgccgatatctagagctagtaacgcgtcttgtagcatggtgggccatcctttcaaagtaggtcatgcaaatagtgtagcataggcgatttaaaatcggcgcagaaatgactaatttttttgcttgacgctaattgccatttcttgtattatattctttgggcgctttgcagttactttaattgcgaagccagaatcggttaacaggctccctgttcattttgaatagggagcttgtttttgtttttggttgtttcccaaaagcatgaatgtttagcgtaatgctaagaagaaaaggagaatatttatatgaccaaatatgtttttgtaacaggtggcgttgtttcttcacttggtaaaggaattgttgcggcttcacttggtcgtttgttaaagaatcgtggattaaaggtaacgattcaaaaatttgatccatacatcaacgtggatcccggtacaatgagtccttaccaacatggtgaagttttcgtaacagatgatggtactgaaactgatttagatcttggccattacgaacgttttatcgataataatttaaataaatattctaacgtgacgacaggtaaaatttattcagaagttttacgtaaagaacgtaaaggtgaataccttggcgcaactgttcaagtcattccacacatcacaaacatgattaaagaaaaaatcatgcgggctgctacaacgactgattcagatatcgtgattactgaaatcggtgggactgttggtgatattgaatcactaccattcttagaagcacttcgtcaaatgaaggcggatgttggcgcagaaaactgcatctacattcatacgacattggtcccttacttgaaggctgccggtgaaatgaagaccaaaccaacacaacacagtgttaaagaattacggagcatcgggattcaaccaaacgtcttggtttgtcggactgaaaaaccaattcctgatgacatgcggaacaagattgcccaattctgtgacgttgaaccagaagccgttgttgaatcacgcgatgctgaatcaatctacgatattccattgttattgaagaaccaaggcttagatgattttgtcttgaaccacttcaagatgacagcaccagaagctgacatgacagaatggattgatatgttacacacaatcaagaacctcgaaggcacgaagaagattgccttggttggtaaatatatcgaattgcaagatgcttacatttcagtgaacgaagcattacgccatgccggttatgcttataacaccgatgttaaagtgacaccaatccaatcagaagatattacgaaagaaaatgttgctgaaacattagctggctttgatgggattatcgtccctggtggtttcggtgatcgtggtttagaagggatgatcctttcaattcaatatgcgcgtgaaaatgatgtaccatatcttggtatttgtttagggatgcaaatggcaagtatcgaatttgcccgcaatgttgctggcattacagatgcaacaactggcgaagtacacccagaagcaaaacataaattaatcgacatcatgtcagatcaaaaagatttagaaaacatgggtgggacacaacgtcttggtttatacccatgtaaattaaaaccaggtacaaagactgctgctgcttatgataaccaaagtgttatccaacaacgtcaccgtcaccgttatgaattcaataacgaataccgtgaattgttgacagacaaagggctagtctttgccgggacttcacctgacaaccgcttagtcgaagtcattgaaattccagaaaacaaattcttcgtggcagctcaatatcacccagaattcctatcacgcccaaacaaaccagaaggcttgttcaaggcatttattggcgcaacaatgtagagtgctgactcgaacgggttggctttgaggattaacaagaaaataaggattatggcgttctttagccataatccttatttttaggttaaccggaaaaggcagttcgaggaagcacgtttcataaaagacgctactagtcatcacgacaaagtagcgtctttttgtatgccgaaaaatagttgtgaaaatggagatggtccgttttgaaaagccttacatttttagacttcgatagcccaattgaatgcgatgattagcttttactaagtatgaaaattaaaaagtaaatgttatccctaaatgccttgtaatttatgtgctgattaattattattatacatgtatgactaattatcaacggcattgagtagattgaagccgttttccaattttaaaaaataaaactaaaaacttaaaaatatcaaaagcgccttctggtttaaaccacaggagaagtgggaaactgaaggcggttcttttgttgcagagcgaacggggaaatctaaaaatgaaaaaaatgttaattcaaggtggcaatctcttatctggagaggtcacaattggcggtgcaaagaatagcacggttgcgattattcccgctgctattttggcggagtcgaaagtcgttttagactgtgtgccgcacattaaagacgtcaacagcctactatccattctagaagatatgtctgtctcatctacttttgttgatgacacggttgaaattgatccaacccacattatttcgacaccacttccaagcgggaagattcaaagtttacgcgcctcatattatttcatgggggctttattaggtcgttttggggaagcaatcgttgggcttccaggtggcgacgatattggtccacgaccaattgatcaacatattaaagggtttgaagcacttggtgcgacagtgactaataaccacggtgctatccaaattaaggcaccaaacggcttacacggtgctaaaatttatcttgatatggcatcagttggcgcaacgattaatttattattagccgctgtccgtgctgaaggacaaactgtcattgaaaatgcagcacgcgaacccgaaattgtggatatcgcgacattcttgaacaacatgggtgctaagatccgcggtgctgggactgacattatccgcattgatggggttgaacatctgtatgggcgcaatacacacaccattattcctgatcggattgaagcgggaacttatttaagtatggctgcagccatcggggatggcgtgaacgtcaagaacatcatcagtgaacacatggacgcttacctcgctaagttagaggaaatgggcgttaagatggatgttaaggaagatagtatcttcgtttatccatcacctaatttaaaaatggttcaaattaaaactatgccatatcctggctttgcaacggatttgcaacaaccactaacgccgctcttattaaaagcgcaaggtgaaggcattgtggttgataccctttatcctaaacgaacacgtcacgtcccagaattaattcggatgggtgcagatatctcaatcgaaaatgatgtgattattttacatcatgccgacaagttacaaggtgccgaagtatccgccgatgaaattcggggcggtgcttgtttaatgatcgctggcttaatggccaatggtgtgacaacgattgataacgcaagtaatattttgcggggctatgaccgcgttgttgataaactaacgggtctgggcgcaatcgtcaaaatggttgaagaataagttaaccatctattgttttttgttagcattcatgctaatatttaatggttatgtaaacaaatatctctgacatagcaaatatctcagggcaagacttaagttgtgcatctgaattgatgcagataactttagcaaaaaggagcggaaaagacatgaaacaaggtattcatccagattatcacaaggtagtatttatggattcatcaactggcttcaagttcatctcaggttcaactgctaactcagctgaaactgttgaatgggaagacggtaacacatatccattaatccgtgttgaaatttcatcagattcacatccattctacacaggtaaacaaaagtttactcaagcagatggtcgtgtcgatcgtttcaacaaaaaatatggttttgcagacaagaacgctgccaaataattattttgaaaccggggaatttttccctggtttttttttgcctttttttccataaaaatagccaattgcaaacggcaatcagctatttaatcaacattttttgaattcgatgactagcgagacacgctagcaaaatgactgggaaaaattgaatcgggaaaagaaagagtaacaaagtagcagtgacgtacggttgcgccacgatcaccgtacaactgacagcgacaaccgtggcaaccaggaggccgggagtgtatggcaatacaacggcgagacttaaaccgattgccgcacttgcaaagatggctgggaaaattttaccgccccgccaaccaaaggcaaatagcagattagttagaacggtttttccaagtccgattaagagtaaataaatgaatgattgatctaaaccggatttggtaaaggtgaacaagtagtgttctccagaaaagagtaaataaggcgacaatagaccacaagcacccaagaacacaccagcagctatcattgcaagtaagaccggccgctgaatcgtatcaaagagccactggcaccattgttctatttttaagaatagattgccaaaaactcaaccgacaattaatgctaaaataagaagtggccaaactattaatgtccaatgaatgattggtgtgtgcagtgtaaatggactttctttggggaagagttggttgaccaaggcgaaaccaagaatcccagttgcggttgtgagaatgtataatagaacttgattgaagtgtgatttgaaatgatcgcgcaaggaggttgtctcaatcgcctcaccaacaccggctagcggtgcgtggaagatggccgctagcatggcaccaatccccatcgtcaaaaacgtttctttagtttaagtcgatcgcccaaccaagtgattaggccgccgacgttggtcgagagcgcggcttcagggccaaggctagcgccgcaggctaatacaactaaggcggcgataatgtttttaccgacttgctgttggtaggcaacggacccggtttgtttaaattcgctgagtgtttcatgcattgttttaggataaggcccccaataacgttgcattaagccgacgagtaatccgccaaatagaccaacaagcaacggataaaatggctggttgaaatgcgaataaccgacttgccaaattaagtgtgtactgaaattaatgagggctaaaaaggcggccgctatgccaccaatcaacaatcctaaaagtaagctatataaaacaaaaataattttaaactgcgtggttttagtggtaggtgatgacatagagcctcctagttaagggaattatttatgaactattatgcactacccacgctagtttgaccatagtcgaattgtgagggaaagaataatgaaaatcgatcgattacaagcatttagcgatggcgtttttgccattttattaacactattagtgttagactttaaagtgccggactatcaagcagggcatttgagtcaagcggtgattgcacagtggccaactttggctgcctatgtactatcctttttttatgtggggacattatggttgtttcatcacgattattttgcgaaaataaaacaaactaactggcagttaaacgtgatcaatctcagtattttatttgcagtgacactgattaattacccaactagtttgttgtcggaatcgattgctcaacaaaatggcgctgatattcgatttgcttttacatcgtatgcgattgttgcattagtcatctcagctttgttttgggtattatatcggtatatggcactgcatcatgaactaatgcgtcagtatgaacagcgacacgaggaattttatcaaacgattaaaaatgatcccttacgaagtgtcttgatttacgccattgccattgtcggaattcagattaatagctggctaggggcactgttgattttgctgggcaatatctttcatttcatcgcatacttgcgacttagtcggagtgtcacgctgtatcatttgaatggaaaggatgaataacatggcaaaacaaaaaacaaattggcggtgggtagattggctttatgtcttcaccattgtgagtcaattaatctatattggttattacttagaacaaatgctgactaaccccaaagacaacggaacattgtcttttgccgttttacaagtggttgcaggcctggtgattgcgaccttacctattatcattgaacgctttatgccataccggtttccagagattctatatgcagtttatttaatctttgtatactgttcgattttattggggacgggattacatttttatagtcgcttatactactgggataaattcttgcatgtcttgagtgccgggttattggcgggcttagggtatacggtctttaacgtattgatttcaaaacaactccgtcaaaccatttcagccttactcatgagtttgtttgcggcaacgtttgggagtacgattggtgtgttgtgggaattctatgaatttaccggcgatagtttgttaggcttaaacatgcaacgttatatggcaaaaggtcaccttttattaggccaagcagccttgttagacacgatgggggacttactagcggatgtcttgggatcatgtttaatcgccattatcggctatttctgtattaaacataaccgggactggttagataaactgatgtttaccaaaaaatagagtgcgtttgtggcgcttatattttgagcattaactggatttgacgaattggcgattgtaatcaccgatttggcaaattctgttaagcgcagaaatatgccacaaaaagcacgtttcaacaaaaaagtggtgtcgctctgaaaatgagcgacaccacttttttgtattatttttgtatttcatgttcttcgcgtaagacttttgtattctgacgcacccagaagaggttgacgattactaaaacggttgtcgataggaaaaccccgctgtaaccgaataggccagaaacgctggaaccaattaaaggtccggcgacattccccattgcttggaaggattggttataactgaaaatccgtccggcggaactatggggtgagtacttcgcaagaatcgtttgaacttgcggtaacaatgcggcatcggcgaccccaaccagcagacgcagggcaccgagttgccaaacattttgaacgaaagcttgcggaacgtaaacgaagacggcgaagatcaagccaccgagtaaaattttctcggaaccgatccgatcgccaagtgcaccaaaacgcggcgcggcaattaaggttgcgatccctggagtagccgcgacaactccgctgactaacgctacgttattgccatgatgcattaattgacggacatataaactcaacagcgggctaattgagttgttggaggcttgaataatcattgtggtgacgaacatgccgataattaaatgcgggtatttcaattcatgaatcagttgccgaccgggtacttgatcgcctttttctactggcgtgaagtcttcgtgaacgaaaaccagacagaggataaagacgatgaacaagatggtaccggtaatgaagaaggttgttcgatagccggttgcttgggcgataatcccacccaacaacgggcctaataaggttccggaaacacttccggtggtcagggtgcctaaagcttgaccacttttttcttgtggtgctgaagtggcaattaaggcgtttgaattactgatataacccgagaagaagccttgtaatagtcgcaaaccaattaattcataaatattttggactaagcccatcgcacccaggacaatcgctagtcctaatgaggcgcggagtaacattaatttgcgaccacggcggtcagcaattttgccccaccatggtgaaatcagagcggtaaccaagaaggtaatagaataggtcaccccactccataaactcagttgggccgttgtaaagttgccaagtgtgtcaatgtataacgacataaatggcataatcaaactaaaagcaaccccggccatgaaattaccaaaccataaaacgacgaggttctgttcccattgtgcgcggcgtctgaataaacgttgacgaatgttagtcaacatggtgtcatcatctcgattctaaaaagttaaagcggcgaccacgcttgctgatgtgcgtggtaggcgtcttttaagtgtgggagttgttcaaagagggcagtcagttgcgcatctttagcgcgtggcagctggcgtttaaagtacaaccgctgagtgtcgtaggcagtcaatgcgcttgcttgttgggctggtgtaccatgttcggcaaaatagagtagccaatcaaacagccattctttatcagcatcggcttcataacgggctagcaaagtgtctagctgtgctccctgtgccactaacaagtaatggttacgctgcaaaggggttaactcattatctggatttagatcaattactttgggacctaattgttcgagaaaactatccagcgaatcagcaacggttaaccattgatcgacctcagtatctatgtagcgaatcggtggttcagctgaggcttgttggcaatcaaatacaaagtactgctgttgatgctgactaaaagggactaagtaatcgggcaagtcgggggcttggatgactgcttcaccgttgtgagcaatcccagctaaataatgacactcaacgtcggcgagaccatcacttgttggctcactcgtaggaaggctaaagttagtcaaaaaaccgccattggttgtttgacaaagtgcctgataactcatgggaatccgagggtcatcgacaatcatccgtggtgcagttaaatcaacattcgcaattgctggctgtgcagtaaacatgcaagtatccctcccaaaattggtaactctttaattttaccatttatgtcaaaccaaggttttgttaaggttggcaacctattctttatttgttgtagcgagtctgataatatgaagacaacattaaagaaaagaggatacgcgtatgttgtggtttattattatcattattttgttagtggttggcgcggttggcttctatatcagcacctacaataacatggtcaagagtcggaactggacagatgaagcatggagccaaatcgatgtacaactcaaacggcggaatgacttgattccaaacttagtatcgaccgtgaaaggttatgctaagcatgaacaagacacgttggaaaaagtcatcaagatgcggaatcaattggttgaaatgccagctgataatcggcaagcaacaatggaggcttctaatcaattaacggattcattgaaaagcgttttcgccttgtcagaaagctatccagatttaaaagcggacgcagaatttacgaagttaatggaagaattgacgaatacggaaaataaaattgcgtatgcacgtcaattgtttaactcaagtgctacccgttacaacaaccaaattcaaactttccctggtaatattttggcaggtgctcacaatttccaaaagacagcttacttagaaacgccagttgaggaaaaagcagcacctaaagtttcctttgaatagggtgtgattgggaatgttatttgaacaaattcaacagaacaaacgtaaaacggtatatgtgatgattggcttttttgctttagtattggcaattggggctgcattagggtatctgtttatgcgtaatttgattagtggtgtcgtggtggcggctattttagccgccgtttatatggcgatgatgattggaaactcaaccaacgttgttatgcagatgaatcatgcgaccgaagtccatgatgctagcgaatatcctgatttatggcacattgttgaagacatggcgatggtcgcccaagtaccgataccccgggttttcattgttgacgatcctagcccaaacgcgtttgcaacgggcaatgatccacaacatgctgcagtggcagttacgactggcatcatggcgcgtttgaatcgggaggaacttgagggggtaattgctcacgaagtctcccatattcgcaattacgatattcggttacaaacgattgccttggcactttctgcggtgatttcaatgctcgtgaacatcggcagcaacatgttatggtggggcggcggccgcagtcgtgataacgaccgtgaagaaggtgcaagtaatatcatcggtttggttttttcgatcctattgttgatattgggacctttggcggctagtattgcacagatggcgttgtcgcgaaatcgggaatacttggctgatgcatctggtgtcgaattaacgcggaacccacaaggtttgatcaatgcgttattgaagatttctgacagtgagccaatgcaagctgcggatccatcaagcgcagctttgtatatctcagatccatttaaaggacttagtcggtcgggtgctcatttatttgatagtcatccaccgattgaagaacgagtcgctaaattaagagcgatgtaatgttttaaagacataacgcatcagctgtaggtaatagttgatagaacacgttttatatagagggaggcaaaattcatttttgtccctctctttttttgtataataaaggaaaagaggagtgatcagtgtgcgattatccccaatccagcagttaatggcgttacaatctactctaataatgcaattgaatgagacaccgagcaaacagattaccatgattgatttaccggttgtgcgtggacaattattattggcattgcatgcgcgtcaccagctaacattatcgacgcaacaacgcacaatgattcaacgcgccatcatcacaacgttggcaactaaaacggatggcactcaattaatggatctttggcggcaaacactaccgcagcggtatcggattgttgatcaggcagaggtggtggcccattttgaacagttagaacgcgctaattgggacgttgcgagtttacgcgcttatgcaacccatttaacgggacaacttgctgcgcaaccaacagcgcttaaaaggattttgcaacacaattggcaagcattacatcaagtaggctcagcactttatcaaatgctttttgaagcatacggggaccgaactgcacaaccagtaattaattaccagcggatcaatttagtgctcacgcatttaggggcgcagttggatgagcatgcgtttttgcaattaacagcacgtgattatcaacttgacccgcaattagcaccagatgcgccttttttagcaacctttgcgcaaagtgtgcaacgtgcatttgttggtcgagttttaaccgataaacggattcatcaattcagaatgtatttagatcggcagaatctacgctatatccgccattattttcaacactctggtgaaacagatgaacaagccttagcgcggtttgtacgaaaacgacaagcgacccagccacattattggctgcggcgtgaaccagctcggctccataataaataccgcaacggacagcgcccaacaacgcattggaatcgaaaacgactcacgccggattttcatagtgaatttattctagcaccatctggagcatttatcagtcaatggcaagtgcttaaagtaaaggctgatggtctgattgatagtaatcctgaccattaccagctagatgatggcacactccggcaactactaaacggtgaatcgtttaattatgctaatcggaatgatcggcaacacgcccggttagatagccaaccaccgctgcaaaatgatcatgcactacgcaaaacagcttttaaagggtggcggagtccgactaagcaacaatatcgaccaaatgataaacaggttgatgactattcacggtggtactcttaattggtggtcaatcatttttggggcttttttgaaactatggtacaatattgcgtagtattttaagccataactaaaaaaagcgtgcgtaaaaatgcacacagagtaataggagttattgagatatgaaaatgcagttgggtgaaattgcacgagtcactggggctaaaaacgatattgaacaatgggcaaccattgaagtgacgaatgttgcgtttgacgcacgtcaattaaatgcgggcgctttgtttgtaccgttagctggtatgcgtgatggtcacgactttgttggacaagctaaggaaaatggggcagtggcaactttttgggctgccaatcatgatgcacagccaactgattttcctgtattagtggttacagacccactagcggcttatcagaagttagccatgcattatctccaaaaaattaatcccaaagtggttgcgattaccggtagtaatggtaaaacaacgacgaaagatatgacagctgctgttttaggtagtcagtacaatatgcacaagacacaagctaactttaataatgaaattggtgtgccacaaacgattttatcgatggaagctaatactgaaattttagtgattgagatggggatggatcgcccaggtcaattaaaagcgctcagtgaattagccatgccagatgtcgcagtcattacgatgatcggggaagcccatatcgaatttttcaagacgcgtgataagattgccgatgctaagatggaaatcacagatgggctcaaagaagatggtctattaatttacgctggcgacgaaccgctattgactgaacgggttggcgaactcacaaccgagacattcggtaatttgacgaccaatgacttatatcccttacaagtccgtgcaggtgaaactgaaacgtcattcaagttgaatgcttggccagagatgacgtttacgattccaatgatgggtgcttataatgtcaataatgcgttggccgcaattttggttgggcaacggttccatattaaaccagaattaatgaaaaaagccttggcgaattttgaagtcacaagtaatcggacagagtggcttgttggtcaaaagggtgaacggatgttgagtgatgtttacaattcaaacccaacggctgccaaagaagttttacacaatttcagccattttgagactgacgggcggcggattgccgtcttaggcgacatgttggaacttggtactgccagcaagaaattacacgaaagtttggcccaagaattagatcccacgatgattcaagaggtcttcttgttcggggatgaaattgaaccattatatgtgacgttaaaagagcgttatgcaccagaacgcctccattactttaaccgccatgaacaaacgcaattaattgctggcttgcaagcgcaggtacaacctgatgatttaatcgttttaaaggcaagtcatggcttacatttagaaaaagtagtcgctgctttacaagatactgaagttaattaatgattagcaattgacagacaactgcacaggcacgctgtttagcgattgaagctatggaattagattaacaattggagcaattccgtttgctaattaagttgtggcatgataagctattaaggagcttttttaatgaaaaaggcttttgaaaacaattatattacaagacagatttttgaaaatggtgcaattgacgaagtggacctgttttgtaatggcatgttttttacaaaacaaggaggaacactatttgaaattcgcagaattaggtttatcagaaccaattatgaaagccatcgaacgcgctggctttgaagaagcaacacccatccaaggcgaaacaatcccattggcattagctggtaaggatgttatcggtcaagcacaaactggtaccggtaagacagccgcttttggtttaccaatcttacaaaacttagacttagacaatcctaacattcaagcattgatcatttcaccaacgcgtgaattggcaatccaaacacaagaagaactctatcgcttaggtcgcgaccgtaaagcgaaagtacaagttgtatacggtggggctgacattcgtcgccaaatccgctcattaaaagatcacccacaaattcttgttgggacaccgggtcgtttattggatcatatcaaccgtcgcacagttaaattagaccacgtgaaaacattggtcttagatgaagctgacgaaatgttagacatgggcttcgttgatgatatcgaaagcatcatcaaacaagtgccagaccaacgtcaaacacttttattctcagcaacattaccagcaccaatcatgaaaatcggtaagagcttcatgactaaccctgaaatgatcaaagtaaagtcaaaagaattaacggctgacttaattgatcaatactatgtgcgggcaaaggacttcgaaaaattcgacattatgacgcgtttattcgatgttcaatcacctgaattaacattaatctttggtcggacaaaacggcgtgttgatgaattaacacgcggtttgaaggctcgtggttacaatgctgaagggattcacggtgatttatcacaacaaaaacggatgagcgtcttgaaatcatttaaggctggccgtttagatatcttagtggcaacagacgttgctgctcgtggtcttgatatctcaggtgtgacccatgtttataactacgatattcctcaagatcctgatagttatgttcaccggattggccggacaggtcgtgccggtaagtcaggcgtttcagttacttttgtaacaccaaacgaaatggaatacttacacatcatcgaaaacttaacgaagaaacggatgttaccattacaaccacctacagaaaaagaagccttcaagggccaattagctgcagcggttgcagacatcaactcaatgattgaaaaaggccaattggctaaattcagcgaagaagctgaagaattattgaaacaattctctgacgttgaattagcttcagtgcttttgaagacaatcagcaaggaatcagttcctgttaagataacaccagaacgtccattgccttcacgtaaaaaaggtggcaatcgtagcggcaaccggaatggcggcggcaatcgtcgtggcggtaacggtggcggctatcgcggtggcaatcgtcgtggtaatggcgatggcaaacgtcgtggtaatgacaacaaagacggtcgtcgcaacagtggcaacggcgatagcagcaaacgtcgtagcaatgacaatcgtgacaaccgtaagaagactgatggccgttcaaaacggaacttcacaattcgtacaaacgataaataagactttttaaaaacagcgggcggccaacttggtcggccgctgttttcatatagtcaattgtgacagagatgtaagttcagtctctgtcttttttgtggtaaactaattaaaaatagggtactaggggcgaagacgatgattgctggattaggcattgatttagccgaaattgatcgatttgaaaaagcacagagtaagaatagtcattttgctgaaaaagtattaacagctaaggaatatgaactgtttaaacggtatacggggcgccgtgcgttagaatttttagcggggcgctttgcagtgaaggaagcttttagtaaagcttatgggactggtattggacaggtacaactgcaagcgattgaaacgttaaatgatgcaaagggcaaaccctacatcaaacaagatttatttgagggaactgtccacgtatcactttcgcatacaacgacgttagtgatggcagaagttattttggaaagaggttgagacgatgacagtcggctacttacgaccaacacgcattctagttgatcaaaacgcaatttatgaaaatattcaaaatgaactaaaggatttaaaaggcacagatgcagtgattttccctgtcttaaaagcaaatgcttatgggcatggcatgattcctgttgcagaagcggcccaagcggctggtgctgcaggattttgtgtggctattttagatgaggccttagctttacggcgtgctaactttacggaacccattttggtgctagggattacacagcccaccgaaatcgaattggtgattgccaaccaaatctccattacggtcggctcactcgaatggttgcaagctgcttacgaaattgcccaacaaataccttatccacaaccaatgcacattcatttgagtgtggatagtggtatggggcgaattggttttagaaatgcgactgaattactagcagcagccacatttatcaaagcacatgcgaaatattttgatttagaagggatttttacccatttcgcaactgcggatgatcccgatgatacttattttaaagaacaaagtgcccggtttaatgaactagtagccgtgttaccagaatgtccacgatttgtgcatgtttcgaattcagccacgagtttatggcactcagcttgcaatgagaatttaattcgaatgggaattagtatgtacggattgaatccttcagggaatgcgattcctgaattgccttatgcattgaaaccggcgctaagtcttgaatcagaattggtctttgttaagcaagttgaagccggaagtaagattggttacggtgcgacttatgaagcgagtgaatctgaatggattgggacgattccaatcggttacgccgatggttggtctagacggatgcaaggctcaaccgttttggtggatggacatcggtgtgaaattgtcggtcgggtctgcatggatcaattgatgattcggttacctaagcaatatccagtggggaccaaagtagtttttgttggtaaaagtggtgatgacgaaattactttacaagagatcgcagattatgcagggacgattcactatgaaattatctgtggtttatctgatcggttaccacgggtttacagtggaattgatgaacattaaggattgagaatttgattatcgccagttctgtggtaggatgaataaaggttaaagtgttgattcggaggttgatgcagatgaaagctaaccgtgaacaattatccgttaaattagacgttgagttggtccaagcaattaagcagtattgtgaggtgtatgcccttgatgagaatgatttgattcaagatgcgcttcacgaattcatggcgaccagacagtcaaaagtagataacgtcattaacgggtacgctgagatggctagcatcaacagtcaaattgcggctgaatttaacgcttgcgaaagtgaggcgtacgcacacattcgcgtagttgattgatcctaattggagggagaacaagtgggagaattaatacagcgtggcgatattttttatgcggatttatcaccagtggtcggttcagaacaagggggcatgcgtcctgttttaatcattcaaaatgatgtgggtaatcaccatagtccaaccgtaatcgttgccgcgattacagcaaagattcaaaaaccgaaattaccaacacacgttgggattacggccaaggataatggtgttgaacgcgactccgtgattttattagaacaggtacgaacgattgataaacaacgcttgaaagatcgcgtcacacatttagtggcggataagatggcacaagtcgatcgggcgctcaccattagtgttggacttaaagcggtcttaaatccttaatacataaataccaaaaagaaagaatgaagagaacccgcttataaaagcgggttctcttttttttgacctttatcaacagccggtaaatatgatatgatggtagctgttcgaaaaaacgtggttcgtaaccatcccacgcaaaaaaactaggaggattcaaagatgacgaatcaaagtcgattaaaaacggtgattctaaacgggttagtggcagcattatacgttgttttatcgttattcccaggtatgttgggatttgcttcaggagccattcaatttagaatttcggaaggcttaaaccatttagtggtcttcaataagaaatatctatggggtgttttcggtggggtattagtgttcaatttctttttcagttctgaaaacaagttactcgatacgctttttggtggcgggcaaactttattggcgctgcttgtattaacgcttgtgatgccctatttaaaacaaacttggcaaaaaatggtggtcaatattctcttgttcaccgtttcgatgtgtatgattgcgtggatgattgtgttaaccggttctactgctagcacacacattccattctggccaacgtatatttcgttggcactttcagaagcagtcatcatggtgattaccgcaccagtaatgtatgctgtggataaagttgtgcactttgatgcacaaatgaaatcataaagattaaaaagggcagtcctaattaggactgcccttttttgcgttaaactaaatcatcaagtttggagtcatcacggagcgccttatcagattgtaaatcatcgatttcaggaacacgatagccttttttctcgagcttataaacaatctttttcaaaatctcaagatcaagtccagcaggcaaggtgaaaagggtgcgtcgtacgaattcatcttgcttagcatctaaggtgatgcagctggcgattgaggtatatttagcgataatcttcgacatggcaaccaaatcaccttgttcaccagaagaaagcacagtgagtacatagctacttaattcgagattccacgcttcagaaagcatatttaataacgtgctatgcgtgagaattccgtaaaaattgctatcttcgtctaatacggcgatgtatggcaaatctttaatgttgaagaatactttgaaaaacggtgcgtcaactggaatatacttggtcatattcttcaataagctggtcacgggaagctgcatatcgcccccttgagacttatgacggtagatgtgcatcttatagatgttaccgcggaagatcttgccgctagcatctaggacgggcacacaacggtaaccagactcttctagtagctgtaatgcttcttctaaggtcaccgattcaacaattgtggtgagacgttctttaggtaaaactagggatttaatgagcataggctttctccttagattaaaattctctcatatactaatgtaatcatagcataccaccaagcagattaaaataactagtttttcgactcagcgaaaacttgattagtaatcgatgagaaagaacgtgaaatctaagcaataaaaaagcagggataaaagttaattttattcctactttgtatttaatcgttgagcttactttttctaaacgaattctgtaggtcagctacctctggttaatccgtagaggagaggtgttgctagtacactacgtctaaatcactacaactggaatgccttcgctaacagtatcgtagagtttagccattgtgccaggtggggtattgatacagccgtgtgagccgtgttctttataccagtcaccaccgtacttaggttgccatggcgaatcatgaatcccaacgccagtttcatcgattggcatccagtaattaactgggcttgcgtattcgctgaccccatcaaagttcttccccttcaatgtggcattgcgttctttcttccaaacgctccaaacaccggttggggtgacttgtggtggacgtgctgaaacgatatcagtgtcaattgtgaccttaccatcttgataaagccacatatgttgggcttttaaatcaatttcgatgtaggttgaaccgacactacgcgttttctgatcagttccggaaccacggataacagctgttcttgagaaatctttgcccttaggcacttctgtcattaaggcgtggatttcatcggcaggagagatactccacccataaattccagctgggacagtgactgtgccttcttttgtagaattgaaggtcaaatctttgtcaaaagtatcatactttgcctttaattgataaacgtatttggtaacggcagctttatctagactaattgtaccgttgttatacgttaaccaactttggatgtcttctttaggaacttggaaatcattaccattaactgaatagctgattttttcattagcaatcgtcttcaattgatcggcagtttttttcaattgcttgtccgtagatttcacttcaggttgcgcataatcgttttttaagtcgattgttgcttgaccttggttaataccgtgggcaactgcttttttgaacttagcggcatcaattgtgttcccgtagacttcttttacgagatcgaactgatgattctcgaggttaatatgggcattctctgaaggtttgcgatcagcgttgaccttttcgagggtttccgttgagaatttgtcaaaatcagcggcatttaaaatgagtgcgtcttctgatttagttgtttgttcactggcaaaaacgtggactagccaagaccaaccgttttggctttttttaatcttttccaataacggtttaaaattatggctaaagccagcttcttgaccgctaaaagttagcaatgtttgattgttatcctttagcgtatatttttgacgattcactttttttaagagttctgtgttagcgtctgcgactgattggccactaatgttgacaccggcaacggtcgtatgtggcaagaatgctttttgataatgaagactgactgccgagtaacctccaacaaggataacggctgctacgccaagggcgacgtaggctttcttcgtaagtttcacaacctcaactccaatctctgcataggttaatcataccccagtatcacataaaatacaaaggcgttaactaatagttagcatacaagatatgcacccaaaaagaaataaaaaagtattatttttcataaaaaatatgtagttgataatattaacaccataaaaaaacgactctcatttaatgagagtcgtttgaccaacagcaaagagcttattggcgagtttcgatatctaattcagcaaatgcttttgtaacgatatcttttaattgttttgcagaacggtgcatgctttccatttcgtggtctgtcaatggaatttcaaggatgcttgtgatacctgagcggttaataacagcaggtgaaccgataaagatatcgttcaagccgtattggccttccatgtatacagataatggtaagacagcattttcgtcgtctaagatagccttagtaatacgagctaatgcagtaccgataccgtagaatgtagcaccttttaagttaatgattgtgtaagcagcgtcacgaacactttcgaagatcttaacaagttcttcttctttaatttctggatgagctttaacccattcagaaatcttgataccaccgatgttagcgtgtgaccatacagggaattctgtatcaccatgttcacccatgatataagcatggaccgaacgtgcgtcaacgttaaccatttcagcgatgtctttacggaaacgagctgagtcaagtgatgtacctgaaccgataacgcgttctttagggaaacctgataatttccatgtagcgtatgtcaagatatcaactgggttagcagcaactaagaagataccgttaaagccagattcaacgattgggtcaacgattgtcttcaagattttaaggtttttacttactaagtctaaacgtgtttcacctggtttttgtggtgcgccagctgtgataacaacaacgtcagcatcttttgcatctgagtattcagcagcatagattttcttaggagaagtgaaagctaatgcatcagataaatcgattgcatcaccttgtgttttttctttaaagatatctacgataccaacttcttgtgcaataccttgtaaagttaatgcataagcgtaactagaacctacagcgccgtcgccgacgaggataactttttggtgatctttttcaatgtttgccaatataatgacgtcctttctgtaaatcaattcttcatttcgaaaaccagtatagcataatttacaccaaagttcgcgatttttggttaaattttcagaaaactatttctttcacaaagagagaaataaactgaatatggtataatggttcttaatatcaactggcgactggggagaattaactgctcagaatttttgcgtgatagcgccagtcaaaaagaggacgttaataatgaaaatgattgttggcttgggaaacccaggcagtaagtatgcaaagacaaaacacaacattggttttatggtgattgatcaattatgcgaacggtttaatgtgaccttaaacaagcatgattttgaagctgaatacgggagctttaaatatgaaggggaaacgattttcttagtgaaaccactaacgtttatgaatgattccggtcgttcagtcgggcctttaatgaaatactaccaagttaacctagatgaattagtagttatccaagatgatatggacttaacgctaggcaagttgcgcttacggcaaaaaggttcagcgggaggccacaacggcattaagagtatcatcgcaagtgtccaaagctcagaatttaagcgtgtcaaagttgggattcaacatccacaaaaaagtacagtcgttaactgggtcttaacgccgtttgacaaagacagcgcaccaattatcaatcaagcactagaccaggcatgcgaagcactagaagactggtgccaaaacgacgacttcatgaaaacgatgaataagtttaattagagtgtcgttggcagttggtcagattctgagcatttgcctaacttggcgaattgacgctgcaagcggcgatttgaaaagtgtagcaaagcgcaggaatctactgccaatgacacgtttcaaaaacagagtgcgtttggttgcggttagcaacagagcacgtttcttcgcgccattataataagaaagtaaaggaacttttacatggatttaaggacaatgctggggcagaccaaacaggtgcaatccgttttaaagaatcaacgaccagggattaaacaactacttacagggctttcgggatcagcgaaaaccctgtttttggcgacgatttataaacaacaacccttattgattattgagagtaatacgttccaagccaatcaagttgctgatgatttgagtaatttactcaatagtgatcagatttacactttcccagttgaagaagtgatggcggctgaaatggcagttagttcacctgagtccagagcggaacgtgtgcgaacgttgagttttttagcaacaggcaaaaaaggaattgtgattacatcggtcgcgggcatgcggcggttattacctacagcgcgtcagtggcaagatagtcaactcacaatcaataccgatagtgaagttgatccccaggcacttgctgcgcaacttggtgaaatgggttatttccgagataagttggttggtaaacctggtgagttcgcaatgcggggggatattattgacatttttccactggatgcggaaaatccggtccggattgaactctttgatactgaagtggattcactgcgttcttttgaagcagatacgcaacggagtattgagaatttagatagtgttcaaattatgccggcgactgacttattggccaacacagcacaattggaaatggctggtgaggcattacaagcagcttatgaggcggttgcggccaaaataacggataaaactgaacaaaaacaattggcgacaaactttgaaacaccgattgaacggttgttggccggtgaacgcgttgagaatttagcgttgtttgttgattatctgtatccagatcaatcaagtctgattgattactttaaaaagagtggcttagtgatttttgatgactatccgcgcattttagaaacgcagcggattttgactgaagaagcggccaactggcaaaccgatatgttggaaacccaccgcatgttgccagaccaacgactcatgatggatgcccaagcgctcatcaaaaaagatacacatgcgcatctctatctatcactgttccaaaagggaatggggaagttaaaactcgatgcactcaacaatttacccacgcggacggtgcaacaattctttagccaaatgccgcttttgaaaaccgagattgcgcattggcaaaagcaaaaacaaacggtcattgtgctcgtgtctgatcctaaacgggtcaagaagattgatcagacgttccacgactttgaaattgatgccgtcatcgccaataagactcagttggagacggggcggacacaaatcattcaagggtcacttcaaaatggctttgaattaccggatttaaaactggtggtcttaactgaaaaggaactgttcaatacggcgccgaagaaaaaagtccggcggcaaaccttggccaatgcagaacggttaaagagttataacgaattaaaaccaggtgattacgtggtccacgtcaatcatgggattggcgaatacgtcggcatggaaaccttggaagtcgatggggttcatcaagactacatcaccatcttgtatcgggataatgggaagttatttatcccagtcactcaactcaatatggtgcaaaaatacgtctctgccgaggccaaaacaccgaagattaataagcttggcggtggcgagtggcaaaagactaagagtaaagtttcggcaaagattgaagatatcgccgatgatttaatcgaactttatgcgcaacgggaggctgaaaagggatttgcctttccaaaagatgatcaattacaggctgaatttgaaggccagttcccctatcctgaaacagatgatcaattacgcagtaccgctgaaatcaagcatgatatggaacgcgtccgtccaatggatcgattattagtcggcgacgttggctttgggaaaacggaagtcgctttgcgggcggcttttaaggctgttgaagccggtaaacaggtggcctttttagtgccaacaacgattctggcgcaacaacattatgaaaacatgctgacacgcttcgcggattttgcggtcgaaattggtttactgtcacggtttaaaacgcgcaaagaagtgacggcaacgctcaaaggcttagcagagggcaaagtcgacatcgtgattggcacccaccgcttgttatcgcaagacatcaagtttaaagatcttggcttgttgattgtcgatgaagagcaacgctttggtgtaaaacacaaagaacgacttaagcagttgaaggcacaagttgacgtgttaacgttgacggcaacgccgattccacggacgttacacatgtcgatgctcggtgtgcgtgatttatctgtgattgaaacgccaccgactaaccgctatcctatccaaacgtatgtcatggaacaaaatgccggtgcgatgcgcgaagcgattgaacgggaattagaacggaatggtcaagtgttttacctccataatcgagtgagtgacattgaacgcacggtcgatgagattcaagcgctggttcctgaagcaacggttgggttcgcacatggtcagatgaccgaggcacaactagaaggtgtcatctacgactttgtccaaggtaaatacgacgtcttggtgacaaccacgattattgaaaccggggttgacatgcctaacgtcaatacgatgattgttgaagatgctgatcattacggtctttcacagctctatcaattacgcggccggattggacgtagtagccggattgcttacggttactttatgtataaacccgataaggttttaacggaagttagtgagaaacgacttcaggccatcaaggactttaccgaattagggtccgggtttaaaattgcgatgcgtgatttatcgattcggggagctggtaatttattaggtaagcaacaacatggttttatcgattctgttgggtttgacctatactcgcaaatgttgggtgaggccgtcgctaagaaacaagggaagcaagtcgttgctaaaacgaatgccgaaattgatcttaaactagaagcttacttaccagacgcgtatattaatgatcaacgccaaaaaattgaaatttataaacggattcgccagatggattcagaagcggcctttgatgaaattcaggccgatttaattgaccggttcggtgattatccagatcaagtcgctaatttattagcgattggtcagttgaagatgaatgcagatgacgcgttaatcgaaaccatcaaacaaacgaaagaaatcattcaagtcaccttatcggcgaagggcagtcgccttgtttcaggtgaacaaatttttgaagcgttatcgacaacccgcttgaaagcaacggtcgggtttgaacaagaacaattaagcgtgaaactcgtaatccagccgaagatgcaaccggcagattggttgagtgaagtggcaacttttgttacaagtctcttgaagatagaacaaaagcacacggaacaaccaacggattaggcacgctaagtggaggccaggcatgcaaaataaacagatgcaacatctgatgaaaggcgcggtcattttatcaattgcgtcgtttatcgcgaaggtattaagtgccgtttatcggattccatttcaaaatatggtcggtaacaccggcttttacgtgtatcaacaagtctatccaatctatggcattggcatgacgtttgcacttagtggctttccagtttatatttcgaaactggttgctgaacaagtcaatccggaggaacaaacgcagctgttaagacgctcatttgcactgttaggcatctttggtgctgcaatcttcatttatttacagtatcaagcgccgaaaattgcgggggcgatggcggatccagcattaacaccgctgattgaaatggtatcgtttatgtttttattgatgccgtttctagcggtgacgcgggggtacttccaaggaattttcaatatggtaccgacggcggtttcacaagttgctgagcaactcgtgcgggtcgtggtcatcttggcggcagcgtggctatctttgaaactgcactggtcagtgtatgaaatgggcacatgggcgatatcaggcgccttctttggcggcttggttgcaacctatattttattacggccagcagaaaccgcctttcaactcaaggcgccacaccgtggtggcatcgattttaaggcgtatcaacaattggcaaaacgcttagcgattgaaggcgggtcaatttgcctctttgcttcattaattgtgttattacagctggttgattccttcacagttaaaaaagggttggtcctcagtggattatcggaagaacttgctaagaatatgaaggggatttttgaccgtgggcaaccacttgtccagctgggattagtcgtgtcacttgccttctcatcaacgttgattccgagtctgtcacaagcgcggcaacggcggcaacaatatcaatttcaacaagttgctgaagcgctgattcatatcagtttaggtttatcggcagcagcaaccaccggcctaatggttttgatgccgcagattaattatttcttattcggggatgctgatggtaatcaggcattggtttggtatatgttgagtatcgcaatcatcgcgctgatcaatgcttgcaactcggtgctccaaagtcttgatcagttccataaaacaacggcagccttaattgttgggttaatcgttaaagtagcaatcaatcaatggcttgtgcaacactatcaaattgttggcgcgagtgtcgggactgttatcagcctcggtgttgtgttagccttaattttacggcaatcaccagtgattgtacggcaagcgcttggtttgcaacgctttaccggtaagttacttgcgatttgtgcagtgatgtggctgggtgttaagattgcgctacagtttgcaccacaatcacttagttccagaggacatgcgattttagggacgggccttggcgtactcgttggtgtgctcctatttggcggattagcattacggtggcaattattctcgattcgagaatggctgacgatgccaggtggccggcaactattgcgcctttcgaaaaaaataaaaggtaggacaaaataatgcgcttagataaatttttgaaagtatcacgaatcattaaacgacgttcagttgcgaaagaaattgcagacaagggtcgaatcatgattaatgatcgccctgcaaaatcttcaagcaatgtcatcgtgggtgataaactggagatcggatttggtaataaaacgatggtcgtacgcattacacagatcatcgaaactacgaagaaaagcgatgcagctgaaatgtatgaaattttggaaacaagacaagctgaaaactttgattaaggaaaaagcgctggccgaattaatatgggccggtgcttttttttgtgactttgttgagcatcttaataaaagtcattaagaatctgggatcttagttgacgacctttttgtgaaattgctataatgaacttaattccgagatggggggcttctaagtgagtcgaaaaattgcgaaaatcgagaatgcatttacccagcaacaagcagcccagaaaatcgtgcaagacaaggcagcccatgttaagcgtgttcataaacgccgcttatgtggcttggggattgttgcagtattagtcgtcttaatttgtggtgtgcagattttccaaacccatcattcattggccgagattagagaaacaacggcagctaaagaaaagacattaaaaaaagctaaagcaactgaatctgatttaaagattcaagtgcaacagctgcatgataatgattacttggccaaatacattcggtacaagtattactattctaaagacggtgaaaccatcttcagtttgccccaggacaaggcgcctaatttaaattagcaacaaaaataattcagaatacgaccttgtttcaagggcaaagcgtgctatacttattttattaaatatcacgcttaagtgattaaaagtttgacgagttcaaacgaccatttaggaggacgtagttttatatggcagttgaagttggttcaaaagttgctggtaaagtaacgggcattacgaattttggtgcttttgtagatttaggtgaaggcaaaaccgggttggtacatattagtgaagtgtccgatagttatatcaaagatattcatgatgttttaaccgttggtgatgaagtcacggtgaaggttatgtcagatcaaaacggtaagattggtttatcaatccgcaaagccgttgatcaacctaaagtgcaagaacatccgcgccctcaaagtcgtccaaataataatcgcggtggatatcgcaaaccagagcattcaagcgcacctaaaaaagaaggctttgatgatttattatcagggttcttaaaagatagtgaagatcgcttatcaacgattaaacggaatacagaaggtaaacgtggtggccgtggcggccgtcgcagttaatagaacaaattgataaaggttggcttgaaagtttagtgatagactttcggggcaacctttatttcatttcaagtctgtgttggagaggaatcggtatgttagaacaagcatttcaaacacatcttcaaaaagagcagttctggcaagccggcgacaaggttgtggtggcaacgtcaacgggagtcgattcaatggttttattgtggttattgactcatctgccccaaaaacaacgaccccaagtcgttgtggctcacgttaatcatgaattgcgtgcgcaaagtacggctgaagaaaaatatttaacccagttttgccgattgcatgccatcccgttacgcattcaacattggccaaaagcgagtcatcctgaaacaggggttgaagcggcggcacgtcaatttcgctatgctttttttgatcaagtcatgcgaaccgaatcggcgcattacttggtgaccgcgcatcacggcgacgatcaactagaaaccttgctcatgaaattagttcgtagcggtgaattgcatgaaatgcgggggattcggcaagtcagaccgtttaaaacggggacgttaattcgcccgctattaccttttagtaagcaacaactgcgtgattacgctgatcagattggtttgaggtattacgaagatcaaaccaatcaggaacaaactgttctccgtaatcggatgcgacatgcggtggtgccacttttaaaacgagaaaatccacacttgattcaaaatgccaatcggttcagtcaaagtctgacccaaatggtggcacaccaagatgatctaaccgcggcgttactgccattgttggcaatcaaaaaacagccgacggcaattgaagggcgtttagaccaactcgatggcttgaaccagacacaacaaagggcgctctggcaattggtgtggcaacgatatttcaagactttaccggcgttaaaggcagcccagttaatgcaagtgcaacaattgttggcgaacccgcagaaaccgcaaggccaagtggcattgaacaatggcatcatttttgaaaagcagtatcggtgttttcggattggtgtccaccaaatagtggattctttggtcaaaacacgaacattagcgattaatgaatggctgcggttaaaaaatggcgaacaagttggtgttttcgatatcgaccatctacctaatcaagttcaacggcaacaggtcgtttggttagcaccagaggaatggccactgcaactcagggcgctacaagcaacagatcgaataatgcttgataaggcacaccacaaaaccattcaacggttatggattgatactaaaaccccacaggcaaagcgccaaaatgcatgggcggtttggaccccaaatcaattgcttggccggccggatttacggatttcggcgttgtttaatcgcgaacaaactggtaaaatacggtacatactatgttatttagatgattaagcaaattacggaggctggcacaatgttagaaaaagatattgaacgcgtattatattcaagagaagacattcaaaaggttaatcagcgcttaggaaaacaaattacagcggattatcaaggtaaaaacccgttattaattggtattttaaagggtgcgatcgtcttcatgacagatttgattcgcgaaattgacctccatgttgaaatcgactttatggatgtgtcaagttatggtgctgagaccatctcgtcaggtgaagttaaaatcatcaaagatttagatacgagtgttaaaggccgcgacattatcattatcgaagatattgtagatactgggcgcacgttgaattacttaatggcaattcttaaaacacgtcaagcaaactcaattaaagtctgcacgttaatggacaaaccaagccgtcgaattgtgccagttcattcggattatgttgggatggaagtcccaaatgaattcgttgtggggtacggattggactatgccgaacgatacagaaatatgggaacaattggcgttttgaaacctgaaatttattcgggtaaataaatggtcaataaaagtcagatatgttatagtttaacagtgtcaaaaggacactgtgtcacaaatgatgagaagcttcaggaggtcacgtatgaacaacaaaaagaatggactgtttagtaatagtctgttttacattattatcttagtggctttagtcggtgtgttctcgttcttcatgaacggtaacgctggatcagagtctaaggaagttcaatcaagtacatttttaagtgaattgaagaccaataaggtcaagtcattctcaattcaaccaacgaatggtatttataaaatttctggagaatatcgtaaagcacaaaaaacagaacagcctaaaaagaatcttttaggacaaaaaacaaaagcaagatcagttaaacacttcacaacaaccttattacaaagtgattcacaagttggggcaatgaccaagttagctgacaaatcagcaaccaaggttgaaacccttcaagaaccacaatctggttggtgggtaagtattttaagtcttgtattgccattgatcatcatgtttggtttattctacatgatgatgggccaagcgggtcaaggtggcggtcaaggcggtcggatgatgaactttggtaagtccaaagctcaaaaagccgacaagaaagctaataaagtacgtttctctgatgtcgctggtgcggaagaagaaaaacaagaattagtcgaagttgttgaattcttaaaagatccacggaagtttgctgcattaggggctagaattccagcgggtgttcttttagaaggacctccaggtactggtaaaaccttattagctaaagccgttgccggagaagcaggtgtgccattcttctcaatctctggttctgacttcgttgaaatgtttgtcggtgtcggtgcaagccgtgtccgtgatttattcgaacaagccaaaaaagcagccccatcaattatctttattgatgaaattgatgctgttggtcgccaacgtggtgccggcatgggcggtgggcacgatgaacgtgaacaaacattgaaccaaatgttagttgaaatggatgggtttacggggaacgaaggcgtcatcgtcatcgctgctactaaccgttcagatgtcttagatccagcgcttttacgtccaggtcgttttgaccggaagatcctagttggtcgtccagatgttaagggccgtgaagccatcttgaaagtccatgctaagaacaaacctttagccgatgatgttgatttgaaagaaattgcgcaacaaaccccagggttcgttggtgctgatcttgaaaacttattgaacgaagctgctctagtagccgctcgtcgtagcaagaccgatatcgatgcttctgatgttgatgaagctgaagatcgtgtgattgcgggtcctgctaagcgggatcgcgtgattaatcctaaagaacgtgaaaccgtggcttaccacgaagctggtcatgcgatcattggtttagttcttagtgattctcgtgttgttcggaaggtaacaattgtccctcgtggccgtgctggcggatatgccatcatgttaccgaagaatgatcagttcttaatgagtaagaaagaattaacagaacaaattgttgggttacttggtggtcggacagctgaagaaattattttcaactctcaatcaactggtgcttctaacgatttcgaacaagcaacggatattgcccgcgggatggttactcaatatgggatgactgataagctcgggacagtggcccttgaaaaagaaggtcaaccattcgttggggcagcttacggtcaaggcccagccttctccgaaacaactgcggctgcaattgatagtgaaattcgtcggattattgacgaagcacatcaacaagcacacgaaattattgaagcgcaccgtgaacaacataagttaattgcggaaatgctcttgaagtacgaaacattaaacgaaaaagaaatcttgagcttgttcaatgatggtaagatgccagaaaagaacgctgaagaattcccaagcgaaaaagcagctacttttgaagaagctaagaaggcgcttgaagcaaaagaagccgcaaaagaagattcagaaaaagaaactgataaaaaggatgtgacaatcacacctgatgaagatgatcaatcgacaccagctgaggataatcaacatccagacgatgaagcataaattgttacaccaaaaaggtcgacacgattagtggtcgacctttttgcatcaatccataaaagaggttatttagatgacagattatttaattaaacaaatttcagaagatggccaacttcgtgcttatgcagtgaacgcaactgatgttgtaacggatgcgcaagaaaaacatgacacatggtcaacttcatcagcagcgtttgggcggacgattgtcggcacccttttattgagtgctgctggcttaaaaggtgatacgaagatgacagtcagagttgaaggtgacggcccagtcgggaagattgttgtcgatgggaatgcgcaaggcacagttaaagggtatgtgacgaatccacacgttaacctaccattgaacgacaaaaataaaattgacgttaaaggtggcgttgggacaactggtacgttgagtgtcacgaaagatcttggcttaaaagaaccgtttaccggtcaagtaccattggtatcaggagaattaggtgaagactttacttactaccttgctaaatcagaacaaacaccatctgcagttggcgtttcagtcttcgttaatgaagataactcaattggtgtcgctgggggcttcatgattcaaattctcccaggggcggatgaccggttaatcgatatcttagaagcgcggctgaaagaaatgccgctggtgtctgaattactccaacaagggatgagcccagaggaaattatcactgaaattgtgggcgaactcccaatgaagacgttagaaaaaatacctgttaaatacgaatgtgattgttcaaaggatcggtttgcaaaggcactcagttctgttgcgccagcggatttacaacaattaatcgatgaagaccacggtgctgaagcggtttgtcgtttctgtggcaagcaatatcaatttacagaagcagaactaaaggcaattttagccgcgcaatagaatagtcgcaaatttttgcctgaatactatttttttgctatgataatttggatattgtcggaagacacgaagggaatgggttggcattatgacatggcaaataggagacgtgacgattccaaatcaagtagtcgtcgcaccaatggctggtattacaaacgcagcatttcgcgtaactgcaaaggaatttggcgcaggtttagtggtctgtgaaatgatcagtgatcgcggaattatgcacaataatcaaaagacaatggggatgatgtttgttgatccgaatgaacatccagttagcatccaaatttttggtggttcaaaagacaccttagtggaagccgctaaatttgtggatcaacatacacaagctgatattattgatatcaacatgggttgtccagtgaataaagttgttaagacagatgctggcgcgcgttggttattagatccaaacaaggtttatgaaatggtctcatacgtgacagacgccgtgaagaagccagtaacggttaagatgcggacaggctgggatgaagatcatattttcgctgttgaaaatgcacttgctgccgaacgtgctggtgcttcagcacttgcaatgcacggtcggacacggaaacaaatgtacaccgggcaagcagactgggacattttaaaacaggttaaatctgaattaacgattccatttatgggtaacggtgatgtccggacaccacaagatgctaaacgtatgctagacgaagtgggtgctgatgctgtcatgattggccgggctgcgctcggtaatccatggattttaagccaagtggaaacctacttacgaacaggtgaattgattgctgaaccaaccccatgggaaaaaattgcaacggccaagttacaattacaccgtttagtcgaacttaaaggtgaaaatgtggcttgtcgtgaattcagacaacaagctgcctattacttgaaagggattcctcgtgcggctaagaccaaagcggcggttaacgaagtggaaacggaacaagccgttggcgatattttagaccactttgtagaagaaaccgaagcgagaatggcaaattaggttccttatgttggtgttttcgtgttaaaatcaacattagtagataattgaatgtatggaggaattgtcagttgggacaaaaagataatcaaagagaaatgaacgaccaactaaaggtccggcgtgaaaagttacaattgttaaaagacgaaggaattgatccttttggtagtcgttttgatagaacacatatggctgcggaattacacagtgaattcgaagcaattgaaaaagacgatttagatgctaagaatctagaagtcacaattgcaggacggatgatgtctaaacgggggaaagggaaagttggctttgctgacatccgtgaccgttcaggtaaaatccaaatttacgtgcgtaaagatgaagttggcgaagaaaactatttaattttcaaaaaggctgacttaggtgatcatttagggattactgggcaaattatgaagactgacatgggtgagttaactgttaaagcaacgcacctgactttcctatcaaaagcattacgaccattgccagataagttccatggtttaaccaacgtggaacaaatctatcgtcaacgttacttagatttaatcgcaaatccagagagcttggatcggttcacgaaacgcagcaagattatttctgctgtccgtgaatatttagataacaatggctttactgaagttgaaacacctgtcttgcatggtcaagctggtggtgcatcagcacgaccatttattacccatcacaatgcgctagacatcaacttgtacttgcggattgcgcttgaacttcatttgaaacgattaatcgttggtgggatggaacgtgtctatgaaattggccgcgtattccggaatgaagggattgatacgaaacacaatcctgaatttacaatgctagaaacatatgctgcatactttgattataaagacgttatggatgaaacagaaggtatcatccgatttgcagcgcacaaggttttaggaactggtcagatttcatatcaaggacaagcgattgatcttgatggtgattttggacgggttcacatggtcgatgcaattaaggaaaagacgggtgtcgatttctggcaaccaatgacggttgaagcagcgcgtgaattagctgatcaacaccacgtgaagtatgaatcatactggcaagtggggcacatcattaatgcgttctttgaagaattcgtggaagatacattggtacaaccaaccttcatctatggtcatccagttgaaatctcaccattggctaagaagaatgctgaagatgatcgttttacagaccgttgggaattatttatgtacggtaacgaatatgcaaatgcctttactgaattaaacgaccctatcgatcaacgtgaacgttttgaagcacaagctaaagaacgtgaaaatgggaacgatgaagccgaaggaatcgatgaagattacatcgaagcattggaatacggaatgccaccgactggcggacttggaattgggattgatcgactagtcatgttactgacagatgctgcatcaattcgggatgtcttattattcccaacaatgcgtccagacaacaataataacgattaagattaaactaaagcccgcaagcagacgatttgcttgcgggctttttttattgaaaaaaattgggattataaaaagtttttttagtgtattttgtgggtgaataagcatcaactttcggtatattatgttgtttgcgcgagttgttcgtttaatagttcatttatttgcataaattgcggatactatcgactgtttagattatgaaagttcataaataacagttgagattaatagttgacgaaaggctgtagagctgatatagtagtctatgttgtcagcgagataaaacattgttgctaacgagtcaggtaattaaatcagtttgaatatttattcaaaaaacatttttattaccaagtccagttgctgcgcgtgctggcggatcttcgggtggctctggtggttcgggtggtagcggtggtgggtcttcaccgacatccagttatgttggcggccgtagtcgtgattattattacgatgatgcgggatgtcggcattactacaagtccctaatgcgtcgtttattcgatagtatagtcaccctgcctttcgtattcgtctcccttgggatcatgatttggcgtaaagtgcgtgactggttaaccggacgtagaaaacgggcactggctgataccatgccgttagatgctgaaaccgcggcgcgctttgaaaatgcattctatcaaattgaaacagcttggccctcaaatgacttaagcaacgtggcggacttaatgacgccccattttcagcaccaacaacaacgcatcttaaaccgttatcaacggcaccataaacataaccaacttgagagtatcgccattgtttcaactgagttattattacctgaaaaaccgaaccgccaagatattctagtgacagcgcaaatgcgcgattacttcactgatgagcggcagacagccacggttaatgaccaacgtcgtgaagcggcttatattgaacgtttcagcgaaatttgaacgtttaaattaattgatggtcaatatcgtgtcgctcatattaatcaatccctataaaagagctaccagttggtggttcttttttgttatttaattggttaagtttattgcgttaaacaactttttctcttaaaatagaccttatcgatttaaaaattgtttatccattttgattagaaagtgaggtcatttgatgaccctccatgttggcactgaccagacacaaacggccgtttccttaatgccgcgtaacctagacgattgtgtgcgtgaaatggtactcgttgagcaaaagcaagctgcgattgatattctagaatggcgcttagactattggcaaacaccagcgaccttattaacggctggtcaccaaattgccgcctgcaagcaccccgttattttaacgctcagaacaacccatgatggcggcctgtctgatccaaccgactatttagaccgctatacagctctattatcggctcaaatcggcgatgtggttgatattgagtggtctttacctgaggcagttagaaaagccgtcagcgcgcttgcacgtgcgaatggctatcaagtgttactaagccatcatgatttaaagacaacccctgataatctaacacttcaaaaacaactcgcagcaatgcatgcgacgcacccagatatgttaaaactagcaactaccgctcaaagtaatgaggatactactcggttaatggcgattacccagtcttttacacatgatcacacaaccccactgatcacgatggcgatgtctgaatttggcttagcctctcgcatttttggtggtcaattcggttcagctgtgagtttcggttaccttgaacaccccagtgcaccaggccaattacccattgaacaactcaaaggcttgttgacaatgcatcaaaattaaccgcacaaaaaaagccccgcacaaattcaatttgtgcggggctttttagattgttgattagttccgttcaacgtttaaatcattcatcttaagcattgtatcaacggccttttccattgtttcgattgaaacaaattcgtagcgaccgtgcatgttttcagcaccagcaaagatgttaggggttggaatacccatgaatgaaatcttagaaccatctgtcccaccacgaacaggttcgattaatggtttgatatcaacggcttccattgcatctttagcaagatcaacaacgtccatgtgatcttttaagacttctgccatgttgtagtattgatctttgattgttgcaacaacgcggccttcaccgtatttagcattcatttgatcagcaactttagcagcaaatgctttgcgttcttccaaaccatcacgttcgaaatcacgaatgatgtaagccatgtgtgcttcatcaactgtgccttcaaggcttaataagtgatagaaaccttgacgaccgtctgttttttcagggacttcatcgcttggtaaagcattttggaaatcaacagccacttgaagggcattgatcatgatgtttttagcttcactaggatgcacgtttttaccttgaatatcgactttcatggcagcagcgttgaatgtttcgtattcaagttgaccgattggaccgccatccattgtgtaagcaaagtcggttgcgaaatctttggcatcaaagtgatcagcgccagttccgatttcttcatcggggccaaaaccaatcttgatgtcgccatgtttgatttcaggatgttggactaagaagtccatggctgtcatgatttcagcaaccccagacttatcatctgaacctaataatgttgagccgtcagttgtgattaaagtttggcctttataatttttcatatttgggaattctttaggatctaatacgaatttacccgcatcatctaatttaataattgattcgccatcatagttttcgacgatttgtggattgacacctttggcattgaagtcggcagtatcaacgtgtgataaaaagcccattgttggcacttttttatcaatattacttggtaatagcgctgttacatagccattactttcgttgtatttcacatcacttaatccgatttccttcaagtcgtccatcaatttgtgtaaaaataccacttgtgtttgggttgatgggctcgttgttgcgttttcatctgaacgtgtttcagttgtgacatattctagaaaacgaggaatcaatttttcatatttagccatggtgtagcctcctagatattatttaatactaattctattctaacctacttcgcattaaaaataaatgtaaacggatcagttttttgctgtgatttaatgaatgtaaccgaccaaccacgctgtttggcccacttttcaaaaatttctgtcatcttatccttcacaatactttcgacatgatgaccaggatcaattactgacaaaccagctgccaacatatcgtgaccagtatgataatacacatcaccggtaatgtagacatccgcaccagcttgtaaagcggctgggaagaatttacccccatcgccaccgacaacggcgactgtctgaactattttgtccggttcatttgaaattaagcgcagacctgttaaatcaaatgtttcgcagacaaattgcgcataatcccggaccgtcattgattgagcgacttgaccaatgcgcccaataccaatcggttgttgttgattagctaatggaatcacatcataaacgggttcttcataaggatgcgccgcaagcatcgcctgaacaactttggtttgcatggccactggcagaacaacttcgattttaacttcggtaaccgcttctagatcacctgattggccgatataaggatttgctgcgtccgttggttgaaaacgccctattccggtcgtactaaaactgcaggcttgataatcgccaatatgtcccgcatcagcttgattcaatgccatccgcatctgttcagcatgtgactcagggacaaagaccaccaattttactaatgattggtagtccgtgatgttaaacggttgcacatcgtttagttgtaaagcttcagctagccaatcattcatgccgccgttagtcttatccaaattcgtatgggcggcatataccgtgatgtcatgcgttaacagatccgcatacatcttgttttgcggatcacttagatcgagattccgcgctgggcgaaacattactggatggtgggcaaaaataaaatcaacattctgttcaatcgcttcttgaacggtttctgggcggacatcaagggttactaacacccgttcaatgcttttatcgcgtcgcccgatttgaaaaccggtggggtcattgccttcttttaatgccaatggtgcgtagtcttcaatcgcagcaattaagtcactcgcgactaattttcccatgtcttcatctcctcgattaatgcaatttcatgttcaactgctttgactttatcagtaggtacgacttgtgcgttttgtaattgttgcaataaatgacgccgttttttcaacattgtcccccacttcaattggaaatcagcaggttgtgtttggcggagaacagggccaaacactcgatcactttcgcttaatggtgcaactgatggttggggttcgccaacaatcacttcgtagatatgcccgtcttcagcgacaatcgcttcatcaacgattacatagtcatgtgcattcaaccattcacggacagtactttccatgatattgggttgtaacacgagtcgttcatggccgttcagatgatccaatccacgggttaaaatttccgtgatcaataaaccacccatgccggcaatcacgatgcaactcacatggtcttcttcaggattcaatacctcgacgccatcgcctaagcggacttgaatctgttgttgtaagtgccattgattaacgtgagtctgtgttgattcaaacggaccggcaactacttcaccggcaatggcgcccttcaaccggttttgttccgtaagccaaattggtaaatatgcatgatctgaaccgatatcagcaacaatgctatcttgtgggacaaactgcgcaaccgcagctaaacgctttgataaatgaattggtgacaaaaataaaactccattctagaaactttgattgttatagttagtataccaaattttagacggcatacgcagtcaaagtgaacacttgattctggatagcagaagttgctttaggcaaaatttagttttatactgaaattaaatcgaaaacgctttctatacattaaggagtggtctcatgagttggttgcaactattctgtgttttcatgattggtttaggcatttttcaaatttataagtcgtatcagtattatcaagacttaaaattacacgcagatcaaaatacttctgtctttgcgccagcagcgctctgttcgagtgctttcatggggcttgtctttattgggattagtcttgctagtttattgaattggttataaacgtcaattagccccttctttttgagctttattagttttcggaaatcctagttaacataagataaattatttacagtgaagggggtggtaacatgaactggttaccaattattgggattttaatgctaatcatcggtgttttccaactttcaatgaccattaaaacattcaagactttgaaggttgaagcaaaccacagtacttcagtcttcatgcccatggcgttatggtcaggtgcattgatggggattgtatttttagcagtggggattggtgctctgcttgtttagatacacgcaaaaaaggccgcaagctaggttagcttgcggcctttttattgattgcctaaacgtgctttttagttcaacaacttccgcttaatctaacattgccattaattctaaaatctgaattaatgacaatattgtattaatgctcagttgctcccgtaactaaacgcactttatcgaaaacgtgctctagcaggcatatttctgcggctagctacgtcagtcaaacaaccaacatcgttggttattcgcctgactatgctaaccctcaaaatatagccgcctgcttacgcactcttttattctaaaaagtcttttaattgttttgaacgtgatgggtggcggagtttccgtaatgctttggcttcgatttgacgaatccgttctcgcgtaacgccgaacaccttacccacttcttctaatgtccgtgtccgaccatcatcaaggccgaaacgtaaacgtaagacgttttcttcacggtctgttaaggtatctaggacactttctaattgttctttcaacaattcataagaagcatgttcttcaggactggttgcatcttgatcttcgataaaatcgcctaagtgtgaatcgtcctcttcaccaattggggtttcaagggaaacaggttcttgagcgatcttcaagatttcgcgcaccttatccgtattcatatccatttcagcaccaatttcttcaggcgttggttcgcggcccaaatcttgaagtaattgtcgttgaatccggattaacttgttaatcgtttcaaccatgtggacaggaatccgaatggtccgggcttgatcggcaatcgcacgcgtaatcgcttgacgaatccaccatgtggcatatgttgagaatttgaaccctttacggtgatcgaatttttcaacggccttcattaagcccatgttcccttcttgaattaaatccaagaattgcatgccacggccaacataccgtttagcgattgaaaccaccaaacgcaagttagcttcggcaaggcgttgcttggcttcttgatcaccttgttcgattctcaaggctaagtcaacttcttgttgggcgtttaaaagagatacccgcccaatttcttttaagtacatccgcacaggatcgttaatcttaatcccggttggtgcagtcatatcttttaattctttagcagaaaccttttcctttttaagggtagcggcacttggattcccatcttcatcgacaatcccaatcccttggtcttccactttttgcattaattcattgatttcatcagcttgtagcgcaaatggtttcacgatttttgcaacgagttcatcattggtgatttctttctttggtttgtattccttaattaaagccttaaccgcaatatcaaatttcttcgtgtcagcttttttattatcagccattcagaaacctcctaatatcaatttcctaatttcttttgcgaaacaagtctaatgacctccagggttaagcgcgtttcttcgctcgcattccccaatttggtcgcctcttttaaggcaattttcgcttctcttaattgttcctcaacgttattttgcgcaatgacgaacagacagtcgtttaacgcctcttgacttgcctcttctggtaagtcaagcgcatcaatctgaacgactaaggcttgtaagtcatctgggatataacccatgaagtcggccaaggtcgacttaccttcagctaaaaaggcgcgccataactcgtaaatcagttggtacggggtatgcacaaaactaaaatcggcattgttctccaattgcaggcgcatatcgtcattagccatcaacatatgcaacacttcttgctccgcgtgttcaacccgggttagccgttgtggctgacgcgtcgctgttgcccgcggatcaccaatgattggcggtggtccacccacaaatgcgtcatccggttcaggtggcatgtcataatcatactgactagatgccggtgcaagtggttgctgcgttgcccgtttaacgcgcaatgtttgtaactgccgcttcaacgtatcaagggtaatgccgctatcggcttcaatttgcttgaggtaaatctcgatttcaagcggcgaatcaattggcgcaacgacggacaatgcctgttgcacgtaatcaagttgatccttctcgttatccagatttaacccttgcttcaaataccgcagttcaaatgcaatcggtgtttcagcaccattttgcaaggttgtcttaaattgttcagcaccatattggcgaacatattcatccggatcagcgccactgggcaaaaccaccacactcaattcaagcttggtattttgctgcaacatggtaattgcgcgtttcatcgcttcgattccgggacgatcaccatcataacagacaattaattcccgagcctgttgccctaaaattcccaactgctcagtcgttaaactcgtccccattgaagcgacaccgtttgaaacaccggctgaatacgctgcaatcacatccataaacccttcaaacaggtaaactttgcgttcttggtgaatagcagtctttgctaaatcatagttgaacaaaaccttccgcttgttaaaaatcacggtttcaggactgttcaaatatttgggttgatctggttgtttcaccaaaacccggccagaaaaagcaatcacttcaccttgcgcattccgaatcggaaacatcactcggccggaaaaacgatcatgcagcttgccggtctgagtttcaataaataagccggattgacgtagtgtctggtacggaacttctttattctggaagaatgaaagcattaaatcggtttgatccggtaaatagccaatactaaacgtctcaattaattgatccgtcaagccccgttcgtgtaagtaatctaacgctggttggcccgcttcagtactcattaaaatatgcgtaaagagttcattggcctgacgatagagttgcttaaactgcgtcacttcacttgattcttgaacattttgagtgggtcgataagtctccgctaaactgaagccgacaaagtcagcgatttttgtaacagcttctggaaaactaatctgttccagttccatcaagaacttgaagacattcccaccccgtccgcaagagaaacaatgaaaaatctgtttctcttcactaacggagaatgatggggtcttctcatcgtgaaacggacaaatcccaaataggttattgccgctcttcttgagctggacatactgaccaacaacatccactatgttagtttggctccgaacatcatcaatcacgtcattcggaatctttcccgccattggtctcacctcactattcaattcaaattgtactaagactgtaaaagccgcacctcacaatgaaatgcgacttttaaggattatcagcacaaaaatacactatatatcatagcaccatttaggtacagttgcaaataaatatagcaaactatctcattcgttgtcaaggtcctttttcaaaagtcccattaagatgacaacgtgattatattgcaggtcctttgccgcatagactaatgtgacgttgcccagctcaaggtgctcgtgcactaccttttcaaacgccggccaagctggattagctgcaatttcagcaaggtacttttctttaaaaacgggaaacttagctggctcatgaccaaaccacttgcgtaagtcagtcgttggggtaatttctttcgcccaggtctcaatagcggcgcgttcttttgaaatgccgcggggccaaatccgatcgactagaattcggtacccatctgagtctgtcgctgcttcataaacccgtttcatttgtaacatgctattatccccttttgaattgtttatttaacaatcaattcgtttaaatcacctaaggtaagggcgatttgagcgataatcatcaactgtgttaagcgatttcgacgaacagcttcatcttcagccatgaccattgtggcatcaaagtaagcttcgattaatggtcgtagtgtttgtaagatgccgtaattatcagctaatgggttcgtagcaattgtaccacgtaagtcttcgaccgctgtgtgaagtgctttttcagcttcattttcgaataatgcaggatcaaccgttaaatcagttgttgcaaagtcaactttttcagcgagtcgtaacacacgtgtcacggcttcaaccgttgccttgaaatctgcatcatcttgatggtctgaaagcactttggcagcttcgaacatcacgactggatcttgactttgattcttcaagacggcatctacgatatcacgccggactttaggccgcatgccgttaaagcgttggcgaacacgatccgttaagaaatcgctgatcgcgtcagcattggttgaccaatcaaggttgaaatcagcttgttgcttaacaatgtcactcatcgcagcttgataatcggccattgggaagtgccagttttggttttctaagatgcggataatcccataagcttgacgacgcaatgcataaggatcgtttgaaccacttggaatcatgcccactgcaaagaaatcagccatactatcgaacttatcagcgattgctaaaaccgcgccgacctttgttgcagggagtgcaccttcagcactaattggcatgtagtgttcgcgaatcgctgtggcaacggctggtgtttcaccttgtaataaggcatatttttcacccatgaccccttgcaattcggcaaattcaccgaccatgccagtcactaagtcaaatttataaatatcacttgcccgttgcaaatcaactaattctgcttctgataaaccaaatttttggcctaagaattgcgcgattaaaccaacacgggtcatcttttcagccagactaccaatcttgtcgtggaatgacacgttttgtaacttcgcaacgttttgttcaatcgttaccttttgatcttcatggtagaagaaatcggcatcttccaaacgcgctgtgaggactttttcgttcccagcaatgacattttccatgaagtcggtgttcccgttgcgaacaccgatgaaaacaggtaataaatcacccgcttggctgcgtgcgtagaagtaacgttggttatccttcattgaggtaatcaacacttcttctggaatttcaagatacttaggatcgaattgcccataaaaagcagttggccattcaactaagttcgtcacttcttctaacaagtttgcgtctaaatcgacttgccaatcgttttcttgggccattgtttcaatctgagtttgaattaagttttggcgtttagcttcatccgcaattacgaattgtgcttccagcgttgcttcgtaatcagttgcttttgccaatatcacggcttgacctaagaaacggtgcccttgtgttgtgcgaccagtcgtaacgtttaaaatactgaaatcgataatttcatcgtctaataaagcaacaatccagtgaattggacggatatattcgaagtcgtaatcggcccagtgcatccgcgttgggaaggtcatcgccataatcacggcttttagttctggcaaaattgtttcaacaggtttgccgatgattgatttttcaacatagacgtattcaacgccttttagtgctttaaaagtaatgtcgtcggtcgttaaaccttggccgcgaacaaaaccttgcgctgctttactccagttaccttcagcatcaagcgcaattttcttagcggggcctttcgcttcttcgtgaatgtcagcttgcttgtccgctaggtcttcgatcaagacggctaaccggcgtggtgttgcgtaagttttgatggtcccgaatgttaagtgttgttcttctaaaaagtcgcgtacgcgcttttctagttgttggatgctaggcatcacaacgtgggctggcatttcttccaagccaatttctaataagaatggtttagtcattgttaacgacctccgtgtttgattcttgagcatgttttaagagcgggaagccacgtttctcacgttcagcaacgaatgcttgcgcgattgagtgcgccatccggcgaatccgtgacaagtaaccggcccgttctgtaacggaaacggcaccatgggcatccaataggttgaatgtgtggctacatttcaagacatagtcatatgctggatgaacaaggcctaagtcaattaaacgttttgcttctgtttcgtattcatcgaagaatttcaaaagcatgtcttggttactgtcttcaaaagcatattttgaatgttcatattcaggttctttaaaaatatcgccatataacacgccattgccccattcaagttcgaacacgttgtcgacatcttgaatgtatgaagcaagccgttcaacgccatatgtgatttcacttgtcacaggatcgcattgcaaaccaccaacttgttggaagtaggtaaattgagtcacttccatcccgtctaaccaaacttcccaaccaacaccggcacaacccattgatgggttttcccagttatcttcgacgaagcgaatgtcatgttccaaaggatcgatgcctagagcccgtaaactatccaagtaaaattcttggatgtttaatggggctggtttcatgaccacttggaattggtgatgttggaataaacggttggggttttcgccataccgaccatctgctgggcgccgtgaaggttctacgtaagctgcgttccaaggttctggtccaattgcccgtaagaacgtgtatgggctcattgtgccggctcctttttctgtatcgtaagattgcattagcatacagcctttttcagaccaaaaacgctgtaaggttaaaatcatttcttgcacatttaactttttaaccatttcaattcctcttttccgtattttgcgcataaaaaaagcctatgcgactgttaagtcacatagggacgattactcgcggttccaccctacttcagctcaaagcgagctgctgcttcattggtatgactccgaaacgccaatccactcaagtcttgttctagttctcactcacctagaatcactgtctgaccgtcttaagggacccttttcttcaacgtctattaagttgattactattttagtcgtcttttggcgtgctgtcaatttctgacgacactttttttaattgtggtaattgactatcgaaactgtacatcttatcgatgaattgcttactcttgagcgataggccaaccgtgtcttgataaatccggtcgatcatcgtcttaagctccatctgcgttgtctgtttgacgttgaccgattgaatcttgaataaatcaatcactgaaaaaagacgcagataatagatagcccgttgactaccgtggaatcgattaacatccaagtgccagtggcgttgacaaagcagcccgccataactctcagaataatcaaacggcaaatcagaacgcccacaaaccgcacagacttgcagttgtggctgcaccccgaagacttgtaacatctgaatctcgataatgtgcgtaatcatcgccgcgtcaaagccttcatcgattaatgagagtgcctgttcaatcttcggataccaactgccgagcggttcgctatccggaaaaccaacatcgactaagcctaagatataggtcgcataggcatttaaaaacaagtcattgctaatcgattgaaactgactcgccgacttgacattatttaaaaaggataagccatcatcgcgaatgtcgccaccgtactcagcttgggtaaatggcaaaatagccgcactcaagcgaaacttcggtttattcgcaccgcgtaagtaaaacatctttttgccaaagcgatcggtcaaaatcttgaccagcatatctttttctttatagttcttccgatacatcactagaccattaaagtcttcgaatcgatgttccgccattgcttaagcctacaatctctttttattgtaaccaaattcacggaggtattggttattgtcacgccaattcttttgaatcttaacccagagcttcaagttgactttttcgccaagtaaagcttcaatttcgcgacgtgaccgaatcccgatttctttgataatggagcccttttgaccgatgataatccgtttttgaccatcacgttcaacaatgatattcgcttcaatctggagcttaccattgacgcggtctttcatccgttccacaaccacggcaacagaatggggcacttcttcatgcgttaattcaagaattttttcccgaatcaattcaccaacaacgaaatattctgggtgatccgttaattgatcttctgggtagtattgagggccttctgggagtatttgttccaattcttttaacatttcagggacattgttaccttctaatgcagagattgggtaaacccccttgaaatctaattcatgccgatattgttcaatcattggtaataaatcgtctggatgaatcgcgtcaattttgttaacaaccaaataaacgggttttttgacgttcttcaattggtccatgatgtattgatccccaggcccttttttatcaatcccactaatcatgaataaaatggcatcaacttcgttaaacgtcgatagcgctgcttgatccatgtattcatctaattcattatgtggtttatgaatccctggtgtatcaacgaacacgatttgcgcgttgtcatccgtgtagatcccttgaattttattgcgagtcgtttgtgcttttgatgacatgatggcaattttttcaccgatcattcgattcataaaagttgattttccaacatttggtcggccaacaatggccacaaagcctgagcgatatgtttctgacataatagtcccctttttagttaaatatggcgtgtccaaagacaatggcgccaatcaatagcgctaaaattgcgctgattaagacactggctgcactgatatctttaatctgcttagccaatggatggtactggtgatcgactaataagtccacgagatgttccataactgtattccaaaattcagccataaaaacgataaaaatcgcgaaaataatcactaaccaatctaaataatgtaactgacaataaataccgaaagcaatcgcaacgagtgcaaaccaggcatcacgccgtaaattagcctcagttttaaaggcggtccataatccaccgagtgcgtggcgtagtgactgccaaaaatgtttattcttgcccgtttgtggttttttaccgttgtaatccaaattcatcgaggatcttctcctgtaatggaatcatttgtgcttcatcttcactatgaatgtgatcataaccatttaagtgtaagaagccgtgaaccattgtgtaccctaattcacgttcaaatgaatgtccataagtttcagcttgttcagctgctttttctaatgaaacaaacaaatcaccgatattcttgggaatgtcgaatagttcttcaaagttggctggtaatccttcttcttcaggatcttcttcgattgcaaaactgatgacatcagtcgcacggtcagtatcgcggtattccttgttaatttggcgaatgcgttcgttcgtcacaaacgtgacagacatttctgtgtcttcaggtaaatctaattgttgcccggcatattctaaaatatccgtgaccagttttacgtttgcttctgcaactacttttgtttcatcgataatttggatatccattcaagtgttcctactttctcatcttttcaatcgccgcataggcgttaataatcttagcaacaactgggtgccgtaccacatcttctgaactgaactgtacgaaagcaatcttaggaatatcgtgcaaaatatgttcagcttgcaccaagccgctcattgttttcttaggtaagtcaatctggctaatatcgccgttgacaatcatcttcgagttaaacccaagtcgcgttaagaacatcttcatctgagcaggcgttgtattctgggcttcgtccaaaataacgaaagcttcttctagtgttcggccacgcatatacgcaagcggtgcaatctcaatgacaccacgctctaacaaacgttcagtatgttctttacccaaaacggcatacaatgcatcataaatcggtcgtaaataagggtccaccttttcctttagatcacctggtaaaaagcctaaactctcaccagcttcaaccgcaggacgcgttaaaatgatccgttcgactaatccttgtttcaacgccgcaacggccatgacaacggctaagaatgttttccccgttccggcggggccaatcccaaacgtgacatcgttttgacgaatcgcattcacgtattgacgttgaccgaatgtcttcacgcgaatatgctgccctttacgatccttgattaatggctccgtgtaaagttcttggaaaccagcaatcgtgcctttttgggccatcttcgtcgcactcaccacatcactactattgagcttaatgccatgttgtaacagcgccactaagttttctaaaacagaagcggcttggtcaactgctggttgttcgccgcgaatggtaatatgctcgtcaaacgcaatcagttcgacagataagctttcctcgatgatttttaaaaaagtatcgtgtgtgcccattaaagcggccgctaaatttggcgttgccaattgaaataaacgctcatctgtttcagccaacaaagataactccttccagagtgtgactgcaactgattctgagtattatctagcccagcaaataaacgactttagtcgattattaactacacgtcgtaaagtgaagaatcaagttgcaaccgcacgtttcaacttcatttgttttagaatgaaaactaccatcattctatcacaaacaacaaccgttttaaaagtagccagccgcgctaattcacgaatttatggtcaattatcaaaatctgaattaacgaccataaaaaaaagcgggactccccagaggaagtcccgcctaaaattaacttaattttgatttaacgacttgattgaccatagcgccatcagctcgtcctttgaccttaggcatgacatattgcatcaccttgccaaagtcagccttacttgtcgcaccagtagcctgcattgcttcgtcaacaatggtgaccactgctgcttcatctagctgctctggtaaataagcttgtacgatttcaatttctgcttttgtttgttcagcgagatctgcacgatcgcccttttcaaactcagctaatgaatccttacgttgcttaagttgtgatgatagtacacttaattcttcgtcagaagataagtcttgccccgcactaattttggcgttagttaaagcggtctttaaactccgaataacagctaatcgcaacttatctttggccttcatcgccgttttcaaatcagaacttagttgttcaagtaaactcattcaatcatttcctttatctaagaaattagaacttcttacgttttcttgcagcttctgatttcaacttacgttttacacttggtttctcgtaaaattcacgtttacgatattcttgtattgtaccagcttttgatacggaacgcttgaagcgacgaagagcatcatctagagattcgttactgcgaacgactgtcttgcccatatgatatccctcccctcgcgtgctaagtataaccgtttacgttcgttaaaaatttaacttcacgtgaaccgttctttgctattatagcgaatgttgaaaatacggtcaataacccacagggaattaattgaatattttttcaaatctagcgattttttcgataattatggtatgatagcgctataaaagtgaataaaggagcatgccttatgccagaatctaaaccattaaccgtttttgtgctttcggactcagtcggccaaaccgccctccaattagcacaagcagcgctcgcccaatttccggacgttaaacctgatctcgtccgcttccccttcgttcacacgcaagagaaactcatggacgtcttaagcaaagcggttcctgaagaaacaattgtggtccatacattagccactaacggtctttctgaaatcgccgaaacctattgccaagcgaaaaaaattgccagtttcgacatgatgtcaccaatgacacaaatgattactgctaaaaccaacagcacgccaactggtgaagctggggcactacatcatttgaacgatcgttattttgatcgcatttcagcgatggaatttgctgttatgtacgatgatggtaaagacccccacggtttcttagaagcagatatcgtgttgctcggtgtttctagaacgtctaagacgccgctgtcgctctttttagccaatcggaatatcaaggttgccaacttaccaatcgtgccacaagcgcacattccagacgaaatctggcgggttgatcctaagaaaattatcggcctgatgaatacaccagaagtcctcaataacattcgccgggaacggatgattgcttatgggttaaatcctgataccacttattcagacatggacgaaattaaagctgaattggctttcgcccaagacctgtatgataagattggttgccaagtgattaatgttgccaaccgttcgatcgaagaaactgccacaattattcttgaacgcatgggcctcgattttgcgggcagtgcgaacgatcacgtcaattaaaaaaagcgttcaaatctgaaatcgatttgaacgcttttttaatttgttaatgtttaatcgttaaaaaactcgcaaccgaactacgctgcgaatgaaacgcattaatcatcccttcactacggtaccccatggcaatcccaccaatcaacagttcattttccggaatacccattgctttgcggaccgcatctggatacttggccgtttcataggcaggaattgtatcaatttgttcgttagccgcggctaacagaatcgactgactaaaagcccccatgtcataaatcatccatggcgaaactttgcgctcaaccgtcaagtaagtcacggcgggcgcgttgaacagatggcgttgtaaatcgctaaaattcgctaacccgtcttcgccaagataggcactgatttcatcattccacacgcgactgttctcagccattaacggtccccagtctgtccggtgaatcacgtttaaatcagagtagcctttcatccggtttcccgttcgttctaaatgatcggctaacgtttcacccgtcgctacatagactttccaaggttgtgaattcgtccacgacggtgttcgttgggcggacaccattattttttcgattaattcatccgagatcggtttgtttgggtcaaatgcccgaattgccttgcggtgattaaccacatcgttaaactccatgtgctttcctcctccaactaacacttatttagcgcgttaattacattttaataacgctcataataccagtgtgttggcgtttcacctaatcatttgattggactagaaagtcccaccaccggaaccgccaccgaaaccgcctgatgagccgcctgaaaagccgccagaaccaccactaacacttgttggattagcagcactgaccgcactgccaacactactattgagagctgttgtaaaggattgaccgatgttcaaccccccagtatacccgtagtaataataataacccagaggcattgtttgaagttgttccggcgtcaatcgaatcttcaaagctttaacgaccttatcagcaatcccgaaggccgttgcataactcaaatatcgatcccacaatagtacatctgggacattcgccatatcgagtgtcgaaatatcctttagcatttgtttaaagccttgccattcgccccgtttttcgtaacccaattgcgtccatagttgcaaattaaatctacgccagacggttaaaatgaagacaagccccatcggaatgagcgtccaccaagcaactaagccaatcaaagcaccaaaaatcaaaattaaaaatagggcgccaaggccgattaaccaataattcaaactggtcattaactcagcgatgtgttctcgtaaccacccgctacgacttgcttcagtcgccactgctgtttgccacccatggtaatgttgattgaacagttttgcactatgccgttttggatatttctcaatctcaaatagactgacatgctgcccatcaccaaccacatcaaatagccagctaactaacttcttttctgaatgtgataactgattgcgattgacgagcgttaatgaaaattgcggcatttttttatggaatagttccttctttggttcctgaacatcaattgttagattctttcgagcaactaagtctagaatcgttgcggataagctctccgcccctgctgtctccgtaattggtaatgccaacaactgacgcacaaccgcaggcccattttcatctggcaaatcatagacgtgttctggtgcctgtccagtataagtcatcacaggaagcgtttttcgaattttacgtaaaattaacaagaacatgccgggcgctaagaccactgctcctatagataaaagccaataacggcgtttttgtgctttgcgttcttgattagcttgttgcgccaaacgtgcttcttgtttgataatggctgcccgacgtgattgatcaatctgattcggattcgccgcagtcaccgccgttggaaaaataatatggctttcgacaaattggtttgctggattattagcgagtttaattgttacccggcctttatcgggttcaacgacttgttgcccatctaaattgccgtgcgtccatgatttgaggtctgcttttttgaatgtggtaggtaattgtattaccacttgaacgttttgtaagtcactatcccacgcatcgccaatcactttccaattcaattccgccgtatcacgataattaataatcagattttgtaactgatatttcaaagtaaccgctaattgattgccatcttgtgcagtttggtatagtttgaaccgataattttgttgtgtatcagttaagctataggtgccttcagtacctgattcactttgactaaacggatgaccattaactgcgacttgcgggttaaccaacttctttggttgaccaacgtttgtttggagattctggttgatatagaccccatggatatcatcttggatatcaaacaccgttttttgttcgacctgagcactcccatcaggttgtacatcaacgtttacctgataacgactgatgtcataggtatcggcagcctggactggctggctaaaaataaaggtccaaaacgccgctattaagataaaaataccaaacttagttcgttttaaattcatagtttgccttcgttctgctcaaccttcgttaataaatcagggtcgaattgccccgctttgagcatcgcaatttcatacgcatatggtgcaaagttatgcttcttatcttcgccaacatatggggtttctagaattttaggcacattaacgagttgttcatgctgtaagacatggtttagcgcatcaaatccgatttcaccaaaaccaatattggcatgacgatctttgtgtgcgccttgtgggttcttagaatcgtttaaatgaacaacttttaagcggtccaaaccgataatgtgatcgaattcattcaaaacgccatcaaaatcttcacgcacattatatccggcatcatttgtatgacaagtatcaaacgtcactgataacttttcattgtaagtcacgccatcgatcatctgtgcaagttcttcaaatgaccgcccgacttcggttcctttacctgccatggtttctaaggcaatttgggcggtttgatcaggtcgtaaaatttcgtttaatcctttgataatttgttgaataccagcatctgcacccgccccaacgtgtgcacctggatgcaagacgatttgagtggcccctaatgcttcagcgcgtaacacttcttcttgtaaaaaagagaccgcaaacttgaagttctcaggcttcactgtattccctaaattaacgatgtatggtgcatgaacaacaattggacctaagttgtgagcttcaatatagggttttgctgcttcaatatttaattcttcgattggtttgcggcgcgtattttgtggcgcgccggtatatatcatgaaggcatttgcaccaaaatcaactgcactctccgctgaccctagtaacatctgcttgcccttcatactaacgtgactccctaataacattccactacctccatgcattttgattacctagattgtcacagaaagcgcaacaaaaagcaagacgaaacctaacccataaaaaaagcccgccattcaattgaatggcgggttatcttatttaatcttaggttcatagaaatgcccgagaattttgacagcttccgtcatgctgacgaatgcgtggtcatccgcttgtttcatgaccatttctaaatcatgcatttcaaagcgagaaataacggtaaataacatcgtcttttcttcacggttatatgccccttctacgtcgtggacaatcgtaatcccacgccgcatttcgtcttgaatcatttgaatcacaacttggggcttatcggtaataatcatcacttgcagtttttgttggcgcgtataaaccatatcgatgactttgccgttgacaaaaatactcaagatactatagagcgcatgttcccaaccaaagagaaacccagcggcaaaaacgagcgccacattaaacatgatattgattgaaccgactgaacggccggtttttttgcgcagtacaatcccaatgatatctaagccaccagtggaaatatcgtttttcaaggccatcccggtcccaaaaccgttaattaccgccccaaaaatcgcacagataatcggattagccgttagctgtgtaaagggcataatctgtaccataacacttgaaaaaacaactgcaataaacgtataaatggtgaaatggtggccaattttgaaccacgcaagaataaataatggcacatttaacacgaataacatcaatgacgttgataatggaaatggtagaaacggcataaatttcgacgtcactgtatgaatgaattgcgcgaacccggtaaccccagaggcgtaaatgccaccttcttcccagaaaaagttcaatgcaatcgacacacaaattccgtataaaatggctgccgaaatcttcgccatattttgatgtttccgagctaaatcgtccacttgaatatcacacctattcacttttgatgtctttcattctagcataccatttgtgaatactaaaggatttcttggaattaatgcacccaattttcacgaatgaaagcacggcgtgtcccctcgaccaattctgctctaaatggttcttttttatagaaatcttggtgatattcttcggctggatagaacggtttggcagcctcaatttgcgtgacaatcggttcgttgaagcgaccactatcgattaatgcttgtttggaagcttccgcgattgcacgttgctcaggcgagttaacgaaaatcaccggccggtaactatcgccacgatcttggaactgccccatggcatcggttggatctgtttggcgccaataaatttcaactaattccgcataagaaataatcgcgggatcaaatgtaatttcaactgcttcagtgtgccccgtcgtatgcgagcaaacttcctcataagttggattaggaacatgcccaccggtataaccagaaacaaccttgataatccccggttgctgatcaaacggatgaaccatgcaccaaaaacacccaccggcaaaaattgctgtatcagttgccattattgtgccccctcttcaaataagcttagatattgaccgtaaccttcattttcgagttgctcgactggaataaattttaaagctgctgagttgatgcaatagcgtaatccaccagcttcttgcggtccatcattaaaaacgtgccctaaatgcgaattagcttcttcactacggacttcaacgcgttccatcccataagattggtcccggcgttccgtcaaaggcgcaattggctttgtaaatgagggccaaccacagcctgcatcatatttatctaacgaactaaataatggttcatgactgacaacatccacgtagatgccttgttcatcaaaatcatcatactcgccggtaaatggggcctccgtcgcattttgttgggttaccgcatattgttccgtcgttaaccgttgttctaaatcatctgtcatatccatcactccttcgtgtttattattataagcagatacaaacagatagcgacaaatatgctcagagtgttctgacagtctgggatttcctgaggattaaagtgaattgactgccatcaaataaaaaagatgcctcaaatttacttttgaggcatcttatatgcgttaattttgatttaactgttgttgcactgctttaaagtcagcatagacttcagcaagtggtaccgtaatttcaacaccactaatcatgtctttaacatgtgctgtttgatcagctaattctgattcaccgattgtaatcaccatttgggcgtttaacttattagctgttttaaattgcgcttttggtttacgatcaagatagtctcgatcagcggttaaacctgtatcacgaatcttttcaacgatttggagagttgtcgcacttgtttcagcgccaattccaacgacatacacatcgagtttagattctggaaccaacgcttcgttttgcgcattcatcaataataataatcgttcaacgcctaagccaaaaccaacccctggcatgtccgggccaccaagttgttcaactaacccattataacggccaccggctaagacggttgtgtagccgcgaccaagcaccttattatttgtcataatttcaaaaattgtgtgattgtaataatcgagtccgcgcaccatttcagtatccacttcatatggaatgtgcaatgtttcaagtaagtgcttaaccgtttcaaagtgcgccgttgcttctggtgttaagtaatccaaaataacaggtgcatccttcacaatttcttggtccttagcatctttactatctaagacgcgcaatgggttcttgtgtagacgaactttagaatcgtcacttaattcatcaaaatgtggttcaagatagctgacaagggcttcatgataagccgcgcgactttccgcatcccctaaggtattgatggccagttttaaatccgtaatatggcattcacgtaataaacgcatcgccatgctaatgacttcaatatcgaccgctggattctcagaaccaaatgcttcgaccccaatttgatggaactggcgttgccggcctgattgtggccgttcataacggaacattggtcccatgtaatacaccttataaggtttttgatgttctggcccataaagtttattttctacgaacgcccgtacaactccagctgtgccctctggacgcagcgcgatatgccgatcccctttatccatgaaatcatacatttctttgctgacaatatcagatgtatcgcctgaactccgtgaaaagacatcatagctttcaaataatggtgttctaatttcgttgaattgatagcgggcaaaaacgtcgcgtgccgttttctccactaattgccactggtttgaatctccaggtaaaatatccgcagttccttttggcttttgatagcccatgatcattcctccaaatggataccaaataaaaaaacacccctgtcgttgaacaagggtgcttaaatgcacggtaccaccttaattttagcttaattatataacgttgttgccaacggtgtgcgaccacacagacctcaaaagcagtctcggcgtgccattgatttcttgcagctgtgaaatcatctctgtcgtagggggcttagcctttactttatcactggtcatcacttattcttattgttataagattaacgttatttcaaaaaaaagtcaatcaatcttgaattttttgtaactttttcgctgaaactctttagaaagttgagttttttgctataattaaccttataaattaataaaacataacaaaggtgttgaaaaaaatgcagaaacctttgagctggtttaaacactatccggccgttattatattagcattactcgtttttgtcggtctctttgtgacccacgcgctggctgcttaccaacaaattacgattaaagcgaacgtcgtaaacgttcgccaaggccctggattatcttatgatgtcatgagtcaagccaataaaggcgaaacaatgaatgttatctcacaaaagaataattggtaccaagtgcgcttaagtggtgataagattggctgggttgctagctggttagtcgataacaccgaagtcagtgccacttcaaaccgagtcgctaaggtcaccaacagttttgccaatgtccgccaaagcagtagtgccgatagtcaactactcggtaagttaaatcaaggtgacgaaattacagtcttataccaacaaaacggttggagccagattaaatacaactcagcagttggttgggtacaaagtgatttaatcgaagtttccgaccaagctccggcgactgttcaaaaaacgacaaccgctgaatctgagtctacggatactgatacaagtagctccgcgattaaatcagtgaccacccaactggataataccaagctacgcactggtcctgatgtttcgtatcaatatacccaaagctacccagccaataccaagctaacttatatcaataagagtggtacttggtatcaagttaaagatgccgatggtaataccggttacgtcgcaagttgggttgtcactccttctgagaagaatgaagttgttaagactagcgctacttccctttctgaagccaccattgttttagatgctggtcatggtggcaccgacgtcggtgcactttcaactaagtctaagtatgaaaaagactacacattagcgaccgtcgatgcgattgctaaaaaattaaaagcggctggtgctaacgtcgtgctaacgcgttcaaatgatagttttgtcgatctcgaaccgcgacctgctcttgccaataaattaaaggctgatgcctttatcagcgttcattttgattcaagcaatgaagccaatgaagcatccgggacaacaacctactactattcaagcagtaaggatatgagcctcgcgaaggccatcaacaatcagactaagacattaccgcttaacaatcgcggcattgaatacggcaattatcaagtccttcgcgataatcaacggcctgctgttctcttagaactcggctacatcaattctgataaagactttagttatattagcagtgctaattaccaagctaaagtcgctgatgccgtttataccggcttaaccgactatttcaaataactaaaaaagaaccgtcagattaaatctgacggttcttttttacataattggggcaaacaaacgcgccaagtcctgtgaccaacgttcttgattgctttgctcttgtatccgttgtttcgtaaatggtaagcattcttttaaatcagccgtaaaagattgttcaagttcagttgcgagttgtgcatcatataaaaaagcggtcgtttcaaaattcaatctaaaactgcgaatatctaaattagccgtcccaaccgctgctagttgcccatcaactaacattacgcgtgatttaaatccggttgattcagagaagtaaatctgaccgcccgccttcacgatttgtctagcgtaatacaaactcgcatgatgaatcattttatgttttgcacgtttggccatcatgatcttcacagtcaccccagaattaatggctaacactaacgccgccaatacagaatcatccggaataaaatatggggtctgaatccacagccgttttttagcggcagcaatcatcttcaaaaagcctaacttaatctcatcgagttctcgatcaggtccacttgataccagttgcatgctagtctgcccgtgttcatctgagttaggaaaatattgcggactgtaatacaccttttcctgacgcgtagccgcattccagtccatgaaaaagcgagcttgaaacgataacacaccatcgccggtaatccgaatccgcgtatctcgtgcaggaatattaacgtgatgattattctggttaaaatcgccaaggtaggcggtattgccatcaattactgccaattgccggtggttacgaaagttaaagcgtagattaacgaaccggaaccgagaactaaaaaacgggacaacttggccgccggctgcttccaatggcttaaagaactgccgggataaatgttgcgacccaaatgcatcatacatcacacgcacttttaccccccgcagtgccttgtaagccaatagattgaccagttgacgcccgtgttcgttgtcataaaaagcatagtattcaagatggatatgatcttgcgcccgattgacatccgttaacaactgttgatacgccgccttcaaatccgttaaaattgttacattgttttcctgggtcacaaccgcggtatttgatactaagaagaggttgattaagctctgcgtttctggcggtaacgtgtgttgcttctgcgcttggcgtaacgctgctttttgggaggtcaccaaggcatcaatgccgagccgttcttgtgttttcaaatcgaccatatgatcttccggtaatttttttccgaaaaatagatacaaaacaaagccgataattggtaagaaaatcaataccaagagccaggcccaggttgctgcaatatcacgttgttggcgaaatacggtgataacagccccgattgtatttgcaatccaaatcagtgctatcccccagataatgattgctgtcattcttcattcatcctattctttaaaccactttgcttttaatttggctagcgtaccatttgcttgtaagacccgataacgtcggttgataaattgacgtaattgttgatcttgcggacgcatcccaacagcaaactgttctgctgcaaaaggactgtcgatggcttgaaaatcgctgccgttgtggcgtgacttaatttcaaattgcgcgtagacttcatcaattaagagccccttaatccgatcggcctgtaagtcgataaacgcattgttataagtatcatataggattggtgcatggttggcaattctttgctgtaatcgtttaggataacgctctagttgttccatcccagatgagcccgtttgaacgcctaatggttggttggttaaatcagccatttgattaacagggtgtttcttgagcgacacaatcatttgccgattagtcagatacgggtcactaaacgcaacccgttttgcccgttgcgccgttttagaataaccactccaaattaaatcaatcgtttgattattcaattccgtttctttcatatcccaatcaatcgactgaaagtcaacccgaatgccactccccttaaaaatcgcccgtgccaaatcaacatcaaaaccggttaattgaccattcttctcacggtaagtcattggcacaaaactatcatcaatcccgacgactattttttggcgtttttgaatcgttgcccattgatcagcctgctgattgcgttgtgcgcaccctgctaaaccaatcatgctcatcaataaagccgctattaatgctgtttttttaagcttcatcattttgttgaaccccgtttggttgtaattcaaagatttgatcagcaatctggttggcaaattgaatatcatgggtgacaacaatttgtgtcattccctgctgtttcaaatctaaaatgagttgtgcgacacttgccactaacgatggatcaagtgcgctggttggttcgtcataacagagaatctccggttgcatcgccaatgcgcgggcaattgcgactcgttgacgttgaccgcctgatagttggaacggataagccgtcgcctgagcacttaaccctagttgctgtaataattttgcgccatctgctttagcctttttagcgggttgttttttgaccatgatgggtgccagcgtcacattctcaaggacagaaagatgtgggaataaccgaaaatcttggaagacaacgccaatgcgcgccccttgttcccgattactaggttcgtaaggtttaccatcaataataaaccgtccgctatcgggttgatcaagcccactcattaaccgtaataaagttgatttgccagcaccacttggaccgacaatcgctaaaatactccctgattcaactgataaatttaagtcgttcaaaatttgccgacctttgaaggattgattgatattttctaattgaaacatgttgccgcctccttagcgataataacgataatagcgttccaaacgccgtaatgcccatgtacaaatggctgttaacaataaataaataatcccgactagcaaaagtggtaagagattgacatcacgcgcacttgcgacattgccagcccgcagtaaatccccaatgccgataacatacactaacgatgaatctttaatcaagttgatcacttcgttaccgacagacggtaagacaattttaaccgtttggggcacgataattttagcgattgtttgtgggtaagttaagcctaagacctcagctgcttcgatctgaccattatcaacggcttgaaagccgccccggaaaatttcggcaaaatacgcagcataattcaaaataaaagcgattaaagcagcatcgaaccggttaaaaacaattccgaccacgggtaaaccataaaatacaaaaattagttgtaataataacggtgtcccacgcatcagccacacatataaatctaaaagataatgcagtggtttaaacttagctaataaccctaaacttaataataaaccaagtggaatcgcgccaataatcgttaggccaaaaacagccaacgtcatctgcgccccacttaataatgctggtaaaatcgataaactatagtcaatcatgacagactcctctcatttgtccaaaataaaaagccctctttgcgtttaaaacacaaagagggctaaatttcgcggtgccacctcaaatttttgtttgcctcacaacaaacaactcagttagttttagaccaataaaaaaagtcccctggatttctccaagaggacgaatttatcgcggtgccacctcagtttaataaactgctcacgcagcttaaacttatgtagtttctaaaactacagcgataacgggctaacggatcatctttattcgatgatcaaactcacggttgtgccattaatctcaagggccgacttccaccacgcatcagctctctgaacctcaagaattaatttggaccgttcaacgtttaatgtattgttattcattctattcaatatcgcatcaaaagtcaatggttaatgtttattgcttaccgaaaagacgggcccagaaaccaaccttgtgttgtttcaaagtcatcaatggaactgtttcgcctagtaaacgacgggcaatattccgatagccttggcttgctgggtttttcggatccatcacaattggttcgccggcattggacgtcttgataaccgcatcatcatcaaaaataatgcctaacaatgaaattgaaagatgtttggtaatttcatcaacatccatcgtttcgccttcattcatcatatgacgccgaatccggttaattactaagcgtggcgcaatccgcatttcttcttcttctagcaagccgacaacgcggtcagcatcactaacagaagaaatttcgggagttgcaaccacaattgcaccgtctgcaccggcaatcgcatttttaaagccagattcaatcccagcaggacaatcaagaatcacaaaatcgaattcttcttttaattcattcacgatggcggtgacttcatcaggcgttaacgcttctttatccgcattttgagcggctggcaataagtaaattttttcatcaaaacgtttatctttaatcagtgcttggtgcaacttagcacggccttgggcgacatccacgatatcataaataatgcggttgctcaatcctaagacaacatctaaattacgcagaccaatgtctaaatctaacaagcaaaccttcttatctaaaagcgcaagcgccgtcccaatattggcgcttgatgttgttttaccaacgccgcctttaccggatgtaataaccaaagctgttcccatttttattgctccttcattttacgatataattttggattaatctgtttcaaatccgttaactcaccgtagtcgataacatgtaaatcattgatgaaacttacactctgtgccgtaaatggcgtcttctggtgatcgagaatctcaactgcgtctgctatccgcaattgtaacgcgtgtgataaatcacctgcaacaactgcttctgcattatctggaaacccagcgtgcacaatcccggcaacttcaccaagtacgaagatactgcccgttgcttttaacattgcgccttggtgtaaattaccgacgaataagacatcgccaacataattgacctcttggccgcttcgtaaaacattgggttcaacgtgaatactattttcccgccgatcaatctcagcctgttcaatcgtcatgacttccgattgaatgcttgtcccattaaattctggaaactgctcaaagacggtcgccagtgcttgcttttgcgcatcattcaacaagcgtctaccagtggtcagctccagttcaatctgatcgctccccaactgcggttgctctaagcgaatcttattcaataattccgctagtgcaactaatgcttgatcgaaatccgcacccgcatcaatgtttaattcaaaaccttctttgcgtcctcgcaacgtgactgcatccatagaaaaatcaaaccccttaccgttctgattttaattttagcaataaatattttaaaggcaaatacaaaaagacaaaataaaccaaatttaatgcaattgtcggtgctaaaacattactaataaattcgactggtgttactgttgcataaccaatcaagcgattcatgatgtaaatcgtactctcgagtaatgttaaacacaagacatcgattagcccaatgaaaaaggctgagtcaggtaaatattgttttaaataacgcactgtatagataatgagcggcactgcaaaagtgtacatcccgatcatccccgtataatacaaatcgtataaaagaccaatccctgctgcataccacgtaagttggcgttcctctggtaaaacaaaggccgttaccactaacacgagcataaatagccggctaatcaacgtatgatctggtgtatataaccattgttcacataaatgactgatggcgccatccaaataaaacgcaacgagtaagtagattggtaataaatagcgccgttgtaatcgcgtcacacccatgctactcaccttcaatcgttcgtttgatgacagtcacaacggttaaattgtttaaatcagcagctggggtcacataaacagttaatgctaacccaaaatcgtctttcttaactgctgctaccttaccaaggtacaagcctttaggggttaatccacctaaaccagacgtgatcactttgtcacctttttcgattgccgcatcggtcttaatctgcccgagcttcaattgtttccggtcagcattgtaaccggacatgatcccattaacttgcttaccatctttggtattcaccacagcagcaaatccgttactactttgatccgtacttgaaacgagttcaaccttcgaattagtcttgttgacttcaacaatccgtccaataatcccagactcagacatgacgggcatatcttttttaagtccagctaaggcccctttattgataaccaatgcattttgccaattatcaggattccgggataaaacagacgcattaacggttgtataatccgtcaaggtgccttttaagccgagttcctttttcaaacttgcattttcttctttgagggtttgggtttgaaccttggtttgagctaaatcatcaagttgtgctttaagttctttgttttcctggtacgtattaatcaagtctgttaaggcatctacccctcgaccaatcccattggccggcacgctaatgacttggttagtgatgcccgttacgtcgttgccaaattggcgtacgaaactcggactctttttgttattgcgtaaaccaactgacattgcgatgaagcccatgcagacgattagcatgattaataacacaattaacttcttatttgaaaaaaacttttgcatggtttcttcgccaccatccatccttaatatcgtaaaggtgggacaaaaaccggtgatcagtagtccttcctatagcaatcgattcacaacccgaatctgtcactaatttaggcgctacgtcaacgctgaccgcttcttgtcccacttctactgaacgattaatttttcttcataacatcgatattctttaatgattcgccagttccgactgcaacacagtctaaaggatcttgagcgataaagactggcactttagtagcatctgaaatcacttctggtaagtgtttcaacaatgcgccgccaccagttaagacaatcccgtgatcaatcacgtcggctgcaatttctggtgatgtttcttcaagtgtttctttgatggcttcgataatggctgtgacaacttctttgatggcttcagcaatatcaacagcttgaatgtccactgtcttaggtagcccagttactaaatcgcgaccacgaatgctcatcgcttcaatttccttagcgcgttctggtgatgctgaagcgatttggaatttgatttgttcggctgttctttcaccaatcaacaagttattgttttgacggatgtaagaaatgatcgcgtcatctaacttgtcgccagccattcgaattgaacggcttgaaacaatcccacctaatgagattgtggcaacgtctgttgtcccgccaccgatatcaacgaccatgctaccagttggatccatcacaggaagaccggcaccaattgcagctgcaaatggttcttcaatgacgtatgcatcacgagcgcctgccaccttagttgcatcgattacagcacgtttttcaacttcagtcacaccacttggtacgcagaccattacaaatggcttgctagatgagcgacctaatgatttttcgataaaatatttaagcatggcagcagttgtatcgtaatctgcgatcacgccatctttcattgggcgaattgccacaatactaccaggtgtccggccgatcatgtcgcgggcttctgagccaacagcaatcacgtcaccagtttgtgtatttttagcgacaacagagggttctctcaagacaatgtctttaccgtccatgtatacgagtgtgtttgcggtacctaagtcaataccgatatttctagtccctaatccgaacactatttttctctccttcagttaccaaacgtttttatagtcattggcattatatcataattttacgtaataaaaaacgcaatgtaactactatgttaacggattttcagaaaatttgacaggtctcgcctaaaattaacagattcttaaagaaaaaagcgttctcttttactccactaagtaaccctcttctcgcaaactgagatactgctggcttccaataatcaagtggtctaggcatacaatgcccatcagttcaccacaggcgacaattcgtttagtgaaggcaatatcttgcgttgacggcgtcaactggccgcttggatgattatgcaccaaaataaattttgctgcagaataacggaccgctaatttaaagacttcccgcggatgcgcaactgaactatcgagtgtgccaatataaatctgtttcatctgaataatttgatttttaacgtctaaaaaaacagctagcagttgttcttgcgtttcgcccgctagtgtttcaatcatgcgacggccaaccatttggctcgatgcgaccacaccaaaccggagagttcgttgcgtttgcaatcggtgactcaattcacagatggcttggatttcaatcgctttgactggtccaattcctgccagtgtttccaactgcgttaaacttgcttgttctaaatcccgaaagtcaggataatgcgctagcaatttgcgcgccacctcaccaacagataggtgactattaccagaacgcaaaatgacgattgccaattgctcgttcgataaacttgctgcgccgtactgcattaattgttctcttggttgtaattgtcctgtattccccgccattgtttgcctcccacaaaaaaagacgcatgacgcgtcttcttggtttaactaacaatacgttaattaacgggcttatttttctaaatacggaatcacttgagccaaatccccaacggtcgcaagtgtttgctgattggttatcgcagttggtgcaattaaatcagggaccataatcaccggaatggcagctttactagcggccatcacaccattaggtgagtcttctaatactagggcactaggcgctggtaaggctaatctatccaacgcttttaaaaagatttcggggttcggtttgccgtgagtcacttcgtctcccgcaacaatttgactaaaccgtgattgtaggccagtactttgcataaagtcatcgaccatgctgcggaaattgctcgatgcaatcacccgactaatcccctgattatcacagtaatctagtaaatcgactaaccctggcttaattgcaacaccatctgcttcaacaaccgttgctacgttatggtatgaacgatcaataaattctgttgcggccgttgccgaaccaagctttgctttaaaataattgcgtaaatacgtatcagtggtccctaagatggcatggtgatcttcaggtgtaaaatcaaagcccatttctttagcggcccgaatattggcttggtaataaatcttctccgaatcaaccaatagaccgtccatatcaaaaataattcctctagttgtcattgactattctcctttaaaatattggcgaatcgtactaattaaatatagcgaacccgttacgagtaatacatcatcagccgacacatccgctaataattcggttaatgcaaccggccagtccggttcaaatgtaatcgtctcatcaactgctgcatattgggccgctgttgccgcgcgtggattatcaggaaccgtagtcagcaccatccgcgtcgctatttttttgagctgtggtaacatctcatccagatttttatcaccaagcgctccgaataacaggtaaatgtcacgatttttaaattgatgccgcgttgtctgaaccaattgcgccaccccttccggattatgtgcaccatccaagataattaacggctcatcgttgattttttcgaagcgcccaggccagttaacccgttttaaagcacgcttgatgtctcgaacctctagtttttgttgcgtcaactgtaagtaacaccaaaatacttgtaatgcaaccgcggcgttttcaatttgataatcccccatcagcggaatctgtaattgtcgatacgttaccgcgtcattttggaaagttaactgttgcccccaagtaggtaacgttttgaccgcagcactcgaaaaatcacagccactaatggctaacgaactattcaaacgagttgccgtttcctcaaccaccgtcagtgcttcttttggtaattgaccaatcacgactggatgaccagccttaatgatcccggctttttgagtcgcaatttctgcaaatgtcttgcctaatagagcctgatgatcaagaccaatcgacgtaataactgatatcagcggcgtcaacacattagtcgagtcatacaaaccgccaattccgacttccacaacggcgacatcaacctgctgttgtttgaaatatagaaacatcattgctgtgatccattcaaactcggtcacttcaaattcggggtcagttgtttgaatctgggcaaccgttgtctgaatttgttgcgtaacagttactaaatcggcatcactgattggttcctgattgataacaattcgctcgttgaaccgcataataaacggcgatgtgtaacgaccgacttttaaacctaactcttcaatcaaacaactgaccattttgacaacggatcccttgccattagtgccagtcacatgaatgaattgttggttttcttgcggattaccgagacctgccaacaattgcgtcattcggttcaggttcgcttctttatgtaatctggggcgcgaatgaatatacgccaaagctgtttcgtaatctgtcactaacatcgccaatctcctttaacaaactgtctctattttagcatagattgcacgcgaatcgatgcttaaaaactggcgcacacaaaaagaccacctcagtttttaaggtggccttaacgtgcttttggttgcaacaacttccgcttaatctaaaaattccgttaatcctaaaacctgaattaacggaatttttgtattgatgctcagttgctacccgcaaccaatcacacttctttcactaacgtgctcctcgagcagccttttccggttaactgcaaaatgggcatcatggcaaaaaacgccacaatgcccattttactgttaatcctcaaagcctaaccagctcgagtcgcacttcttttttaacgtgttttcatcaacagcttcttgtgctttgctacacttatcaaatcggcgcttacagcgccaattcgctaagttaggcaaatgctcagaagctaaccgttgatgatgcacttatgcattttttaattctgctactcgtttttcgactgattggtattgttgttcgtagtctgcttgtttgtcgcgttcttcttggaccactttttctggtgcgcggtctgtgaagcccttgtttgacaacttgcctttagcacgtttgatttcaccgtctaaacgtttcaattcgccttctaaacgggcgatttcttcgtctaagtcgagcaattcagccaatggcacataaacttctgcaccactgataatggctgtcttcgccaatgctggtgctgttaaaccttcagcaatttcaagtgacttaggatgtacgaagcgttcgatgaagtcttggttttgtttgaagatcgtcattaatggcgcatcttgaatgttgaccaagacatcaattggcttgcttagtggtgcattggcttcggaacggatattccggacacttctaattagatcgattaacgcattcatttgcgttgttgcttctggatcgtctaattcagcgtgcacttctggataagccgcattgacgattgaatcgccagtatgtggcatactttgccagatttcttccgtgacaaatggcatcactgggtgtaatagacgcaatgtttggtctaaaacataagccaagttataacgtttattggcaatggctgcttggtcgtctccgtaaaggacttccttcgccatttcaatataccagtcacagaaatcgttccagataaagttatacaatgtccggcctgcttcaccaaattcgaagctttcataaagccgtgtaacatctgccaccgtttggttcaattggcttaagatccatttgtccgttaaatcaaggttagcggcatctggcatcttcgttggcgctggtgtgtcttcaaggttcatgatgacgaaacgacttgcgttccaaatcttattgatgaagttccaggcagcatccatcttcgtgtaactgaaacgaacatcttggcctggtgttgagccactcgttaagaaccaacgcaatgcatcggcaccgtatttttcaatgacttccattgggtcaatcccattaccaagtgatttactcatcttacggccttgttcatcgcggattaaaccgtgaatgaggacgtgttcgaatgggcgttgttctgtaaattcgagactttggaaaatcatccgtgagacccagaagaagatgatatcgtagccagttaccaacgtattggttgggaagtagcgtttgaagtcaggcgcttcagtgtttggccaacccattgttgaaaatggccataaggcactactgaaccatgtgtctaggacatcagaatcttgagtccagttttcgatatcttttggtgcttcttcgccgacatacatttcaccagtttgtttatggtaccaagctgggatttggtgcccccaccataattgacgcgaaataacccaatcatgaacgttttccatccattgtgtgaaggtattttcgaatcgttctggcacaaagttcaccttttgatcggttgcttggttcttcaaagccatttcagcaagtggcttcatcttaacaaaccattgcgttgaaagccgggcttcaacttgtacaccggtccgttcagaatgaccaacactatgtgtcattgggtcgactttaatcaaataaccttgttccttcaagtcagcaacaatcgctttacgtgcttcaaaacgatccatgccgttatacttgccggcactttcattcatgctggcatcttcgttcatgacattgatccgtggtaagtcatgccgattaccgacttcaaaatcgttagggtcgtgtgctggtgtaatcttcaaagcaccagtaccgaaatccttatcgacatagtgatcagcgataatcggaatttcacgattcattaatggtaatgtgaccgtcttgccaacaaggtccgcataccgttcatcatctggatgtacagcgatagcagtatcaccaggtaatgtttcaggacgtgttgtggcaatttcgatgctcccagaaccatcggtcaatggatagttaacatgatagaaggccccttcatcatcttgatgcaacacttcgatatctgataaagccgtccgtgcttttggatcccaattgatgatgtattcgccacgatagattaagcccttgttgtataaggtaacaaagactttacgaacagcgtctgataagccatcgtctaatgtgaaccgttcacgtgaataatcaagtgataagcccatcttagcccattgtgcgtggatggttgcggcatattcatctttccagtcccagacttgttcgatgaatttttcacgacctaagtcataacgtgaaatcccttgttcagctaattttgcttccactttagcttgagttgcaatcccggcatgatccatccctggcaaccagagtacatcatacccttgcatccgtttttgccggattaacatatcttgtaaggtcgtatcccaggcatggcctaaatggagtttacccgtaacatttggcggtggaataacgattgaataaggtttggcatctggattggcatttggcttgaataaatcagcgtctaaccaatcttgataacgaccggcttcaacttgatttggatcatatttggttgacatttctttgtgatcagtcatcttgttcactcctttaaaatattgcgtttaatggcaaacaaaaaagcattcctcacaataggacgaatgctttttcgcggtaccacctaaattaggactagactagtccccaactcatgatttgttaacgaacgaaattgtccggttagccctacttaatttcaggttaacagctcacaagctaccgattaattggtcattggaagacgtctcagccatgcatcttctctctaaactagcccaatcttaatcgctcttgttcaacgcgttgttaatagtttagctgagtgaacgccaaaggtcaagcgtcaccggcgttcattctgaaaataaatcccgaatcttctccccaaaaaaatcctgagaacaacatactgttattctcaggatttttatagttttaattatttaagatgggggagttcagctaataataattcgctagcgactaatccgagtaggctgacaataacgtatacccagtgagaaccactaccccagctgaatagataagcatcaacaccaactaaaatgataaagagcacgcaatttgtgattaagccaattttgaaagtcaattgactagcaataacggcgaataaaacgattgaaatgaaaataatgaagaatgcagaaatcaaagtgacgaccacctaacgctatccgatttgaaatactacgctcattttactataaccgcagacgaacaacaattaaatttgtgggagataaagtttactttttgggtgttcgttaacagaatcttcaaatttacagtgtacactaggggatattcaactgatcaagggccgttatcaagccgattaatggacagacttttcactgagcggctatactattgacaggtgaatttaattaaaagattgggggaactatcagatggttcgtgagacagatttacgagcacaagatccacgtgttcaacgaacaaagcaacaattacgtcaagccctcattatcttgctgaaagacagtacaccaaaggggatttcgattcaagcaatcaccaagcaagcggcaattactcgcgggaccttttatctccattatgaagataaagtggatttcatccgaaccgcggtggccgatttggtggccgatttttatcagcaagtgactgtagtggtcgatcagacatatcgtcaggtcagtttacaggcactttttgaatatgttgaacaacaacaagctgcttttaaagtgttctataaaaatgaggcgacgcttcactttcaggcacaactgactgaatcaatgcgccaattaatgcaggattacgtggctaaacgctataatcagacttcacaggctgatcaaattgagatgagtattacgattgattatttagcggtggccagtttagcgttggtctttaagtgggtcaatgacgggcttgtgtattcaccacgctacatggctaagatgttataccaattggtacaaacacctaatacgacgtttgatgtcgcacaattttttgtcgaggcgtaataaagcattgactcgccctgtgatattcgatataatatgaacgttgtaattgtgagctccacagctgcaaccgcgcatactaaggcattaagtactatgattagtcaccttagttggcgagtctaagaaaaaataggaggtgcacacatgtacgcaattatcaaaacaggtggcaaacaatataaggtagaagctggtcaagcaatctacgttgaaaagttagccgcagaagctggcgaaaaagtaacttttgatcaagttattttagttggtggtgaaacaactaaggttggtacaccaaacattgatggtgttactgttgatggtactgttgaaaaacaagggcgcgaaaagaaagttgttactttcaaatacaaacctaagaaacacagtcatcaaaagaagggtcatcgtcaaccatatactaaagtgatgatcgacgctatcaacgcctaattgagggaaataagatgattcaagctgactttacggtcaatgccgattcgcaaattatttcttttcaaattacgggtcatgccgactcgggtccttacgggagtgatatcgtctgtgcagctgtttctgctgtctcaatcgggacaatcaacagtttgcaaaagcttgctggttttgaaccagaggtagaagcagataacctgaatggtggtttgttaacttgtcagattccggcaacggtttcgggccaagctttagcgacagctcagattctcttgcagaatttgcagttgacgcttgaagatattacgcaacaatacgggcagtacattcaagtacaaacaaaacgtaaatagacagttaataaacaggaggtgcatttagatgttacaaatgaatttacaattcttctctcaccataagggtggcggttcaacaactaacggccgtaactctgcaggtcgtcgtttaggttctaaacgtgctgatggccaaactgtaacagctggttcaattctttaccgtcaacgcggtacaaagattcatccaggtgaaaatgttggtcgcggtggcgatgacacattatttgctcttatcgaaggtgtcgttcgtttcgaacgcctcggtaaaaacaagaaaaaggtttctgtatacgctgcagaagctaaataatttttctcacacccactttatgtgggtgttttttttgtgcgagagaagcggggctgtcgtcacattctaaacgtgttccatcagtcatatctctccggttaaccctgagtcacaaatgattgttccacaatcttttgcaactctgtgttaatcctctagatatcccagactgatgtcacactctgtttgtgtaaatccagttttactggtatactaattactcaggcaacaaaccattgacaatctaaaagtgagtgttcagatcgacttttgctcgattgaatacgctaaaagggattggcgggtgccggtccctttttttatagctacttttagggataaaaggctagaaatacttgcttttgagcctgatttcttgctatgattaggacaatggcatacttatataatgctcggaggataaacaatgttatcagtaaatgattttaaaaatggcttgaccattgaatttgacaacaacctatggcggattgttgaattccaacatgttaaaccaggtaagggtggcgcttttgtccgctcaaaacttaagaatttaagaacgggtgccaatcaagaaaagacattccgttcaactgaaaaagttgaaaaagcaatcattgatacaaaatcaatgcaatatctttatgcagatggtgacaaccacgtcttcatggatactgaaacttacgaacaattagaattaccagcagcacaaatcaatgatgaattgaaatacttgaaagaaaatatgcaagtttctatcatgatgtatggtagtgaaaccttaggggttgaattaccaaacacggttgatttagcagtggctgcaacagaacctggtgttcgtggtgatacatcttcgggtggtactaaaccagcaacacttgaaactggcttagtggtccaagtaccgtttttcgttaacgaaggtgatttgttaacgattaacacatctgatgggagttacatctcacgggcataggctaaattagcaagaacttgttaggaggggtttcgatggcagaagaaacaaatattgtacttgatacacaagaaaatgcattgggcaagattcaaatggcacctgaagttgtggaagtgattttagggattgcagcaagcaagattgatggggtccaccaaatgcgggggacgttatcatcatccattaacgaattgtttggtcgttcgaatcacggtaaaggggtaactcttaaggtgattgatggcaaagtgaatgcggatgtttatgtttatctgaactatggtgtttctgtgccgaaggttgcccttgcgatgcaagaagcccttaaagaacaattattgttcatgactgatttagaactagcagaagtcaacgtacacgtggtgggcgttgtcactgaaaaagcaccaaaaattattgatccagatgacttatttaacgatgaaacacctgatcaaaatggagaccaatcttaatgcctaattttaaccgacaccaaattcgccaagctgcatttcaagtgttgtttgcgttaaatgctaatgacacattagaattggcagatgcttaccaagccgttttaaccatggatcaattcgatgctgaagaagttgaagaagttgctgttccagactaccttgccttcttggtaacgggcgtcacagaacatcaagcagaattagacgccgctttaacgccatacttgaagaagggctggcaactatcacggttagccaaaccggatttaattatcttgcgtttagggttgtttgaaatgcaaaattcaacagaagcacccgataaagtggcgttgaatgaagcgctcgaacttgctaaacaatttacagatgatcaagcaaaaggttttatcaacggcgttttatctaaattcgttgaagcttaattagtaaaatacgaacgaaatcacttaaaacacgttaaaaagtatttttttagcgtgtttttttgaatttaaacggtcattatcagctgataacccggaattaaccgattaactatgctaaaatagaaacatcaaatatcgataaataggggttgttaactttggaattactagatggtcgagcacttgcaaatgaattaacacaagcacaacaaatggcggtggcaacactcaaacaacaaggggtaaccccgaaattagtggtcgtcatggtgggtgatgatccagcaagtgcgatttatacgcaaagcaagcaaaaaagagcgactaaaattggcatggcatctgagttaaaacgcctgtctgctgaaacaacggaagctgatttattagcggttgttcgccaactaaatacggatgaaaccgttgatggcattttagtccaattaccattaccaaaacaaattaatgaagaccatattatccgggcgattgacccacaaaaagacgttgatggttttagcccagtcaatattgggcgattatggcttaatcaaccgggcttagtggcctgtacgccaaatgggattatgcgcttattggcagctcacgatattgacgtggctggcaaaaatgtcgtgattgttggtcggagtaacatcgttggtcggccattggcagccttgatgctcaatgccaatgccacggtcacgattgcgcacagcagaacggcagacttaaaagccctaacgaaaacagccgacatcttagtggcggccatcggtaaaccacacttcttcggcattgaggatgtcaaagaaggggcggttgttgtcgatgtcggcattaatcggcttgaagatggaacagtcaccggtgatgtcgattttgaagcccttaaatcacatgttagtgcgatgacgccagttccgcgtggcgtggggccaatgacgattacgatgctcatggatcaaacgattgagattgcaaaggaacgtgctaaacgtggttaaaccaacagactatttaacagtcaccgcattaacgcagtatttaaaggctaaatttgaacgcgatccgtatttggatcgggtttatttaaccggcgaaatttcaaatttccgcttacgaccgaatgcgcatcaatattttagtttaaaagataataaagctaagatcagtgccattatgttcaagtccgcttttgaaaagattaagttcactcctgaagaggggatgaaagtgcttgttgtgggccggatttccttgtacgaagcaactggaaactatcagatctatgtggaacggatggagccagatggtcttggtgcattgtatcaagcctatgaacagctaaaagctaaattatcggctgaaggcttgtttgatgcaccaaagcaactattgccgcgctttccaaaacggattgcggtgattacgagtccttctggggctgttattcgcgatattataacaacgacgcaacgtcggtatccaattgcccaactcgtcttattcccagcggtggttcaaggtgacggtgcggctgatattttagtcgatcgactgaatcaagttaatcaacaaggggatttcgatacaattatcattggtcgtggtggtggttcgattgaagatttatggccgtttaatgaagaacgcgttgcgcgcgcgattgttgccagtcagattccggtgatttcatcagttggtcatgaaacggacacgactattgctgatttagtggcggatgttcgggcagcgacaccaacagcagcagctgaattagcaacaccggttttgacggacgaagtgttgaagttgcaacaacaacgtttgcggttatatcaggcattttcgaaaacattggcattaaacaaaaagcaattggtccacttacagaacagttacgtcttaaaacagccgcaacgcttgtatgacggctatttacaaaatgtcgatcagttgcaccgtcgtttattgttggcgcaacaacaacgcttacagactagtcaacagaatgtacaactcttgcagcaacgcctgcagtcgcaatcaccaagtggtgcgattcaacaagcacaaagaatgttgactgataccgatcatcgtttgaaacgagcaatcgagagccttgtccaaaatcggcggcaacaggctggacaagcggtggcagccttggatctcgtaagtccgttgaaaattttgggacgcggatttgcttatgtaacggatgataatcaaaatgtaatgaaaaaaacgaccgattttacggtcgaccaatcaatcgagttacatgtccaagatggcctcgtgaacgcgcgtgttacggccactcataaaggagacgaataagatggcagaaaagaaattaacatttgaagagaacttagcacaattggaagcaattgtgaatgaactggaaacgggcgatgtgccacttgaaaaagcgatgactgcttttcaaaagggtgttaaattaagtcaaacattagaagaaaccttaagtaaggctgaaaaaacgatggccaaagtgatggcagataatggcgaagaagtcccattggatgctgaggcacaagaataatggttgatttcaaaacgttcgcgcgccaacaagtgcccgcatttgaaacctatttgactgagcaacttgcccagattgaagaaccaaccttgcaaaaagcgatgacctattcagtgatggctggcgggaaacgtctccggccacttttggtatttgcggtgcttgcaagtgtggggcgaccgattaatcaaacggcgtatcgcgtagcgggggcattggaattaattcatagctactcattgattcatgatgatttaccggcgatggataatgatgacttacggcgcggtcaacctacgaaccataaggtttttggcgaggcgcaagctattctagccggcgacgggttattgacacttgcatttgaatggttaacgacgaccgatttgacgactgatcagcagagccgtactgttcgattattggcgcaagcagccggtccaagtggcatggttgctggtcagattgaagatatcgaaggacaaactaaaactttatcgttagctcaattgaaacaagtccatcagctcaaaacgggccgtttgattgaatgcgcggtcggcttaggggcgattttggctgatttatccgatgaacaaatggctagtttacagctttttgcgcaaaattatgggttggcatttcagatccaagatgatattttagacgtgacaagcactacagaagcgatgggcaaggcggtccataaggatgctgacgaacataagaatactttcccaggcttattgggcttagctggtgcaaaagacgcgttggatgagacttgtcaggccgcgcaaactgctttaacggatttatccgggttagataaagcactattaaatagttttttaaactattttaatgaataggagaacagatgaaaaaagaacgggtagacgtattattagtccaacagggattatttgattccagagaacaagcaaaacggtctgtgatggctggtgaagtgtacggtaaaaatgatgaacgaatcgacaaaccgggcgaaaaaatcgacgctgaaactgttttaagtgtcaaagggcgtaagattccgtatgttggccgaggggctttaaaattggcgaaagcggtcgaggttttcaacatcgatttacaggataaaatcgcacttgatatcggttcttcaacagggggctttactgatgtggcgcttagaaatggggccaaactctgttacgcactagatgtgggttataaccaactagcatggaaattgcgcgaagatccacgcgtcgtcgtgatggaacgggttaattttcgttacagtcaaccagaagatttcaccaatggtcaaccagattttgccatgacggatgtttcgtttatttcgttacataagattttggtgccgttgaaacccatcttgaaaccggactgcgaagcggttgctttaattaagccgcaattcgaagccggccctgaaaatgtcggtaaacacgggattgtgcgtgatccgaaagtgcataagatggtggttaaagacatcgttgattatagtttagcgacaggctacgacgtgctagggttagatttttcaccaattaaaggtggcgaaggcaatattgaattcttgattcatctacggaatacgacggctgagactggaacgatggcccaaaacgtgaatattgatacggttttagagaatgcctatgctgctttgaaacgaccaacgggaaaatagtgtataaaactttgtattttatgtataaatgcgctatcattgaggaatagaataatttctcacatgaagagggtgttttaatgcgcaaggtagatcggcaacgactgttaaaaaatttaatccagacccatgagattgaacgacaagaggattttgtgaagctgttacaagcggaagacatcgatgttacgcaagccacgatttcgcgggatattaaagaaatgcagctcattaaagtgccaaatgcggacgagggctatcactatagcctaccgcctgaaaagaaattagacgttaaagaaaagttgcgtcggattttacgtgacgcctatattacgcataaccaacaagactattttgtcgtgattaaagccttaccgggtaacgggacggcaattgctaatcttttggatcaaatgcagctcagtggtgtatttggtacaattggcggcgacgacaccgtgttggtgatttgtaaatcagaagaaaatgctaaacagtttacgaagtttattgaagacttgctaaagtaatttggcaagtttttttagcatcaagagaaacgaaagggggatgatcagatgttacaagagttggtcattcacgattttgcaattatcgatcagttagcaattagttttgaagaagggatgacggtgctctcgggggaaaccggagccggtaagtcaattattatcgatgcagtcgggttactcgttggtggccggggttcacaagactttatccggactggtgctaaaaaagcgacccttgaaggcttatttacgatgacgcctaatggcacaaccgccgcagtattagaccagtttggcattgaacacgacgaacaaaccgtcttattacagcgtgatttagccgttaatggacacaatgtttgtcgggtcaacggtcatttggtcaatacaaccactttgaagcatattggggaaaccttagttgatattcacggtcaaaatgaacaccaagaattaatgtatccagatcgccacttggggttgttggatgaatttgcgcaccaaaagttaacaaccgcgaaggcagcctatgccgaaacctatgctgcctatcgtaaagcacagcgtgccttgaagcaaaaacagcaaaatgaacaagaatgggcccaacgcttggatatgctgaaatttcaaactaacgaaattgatgcagcccaattacaggctgatgaagaaagcaagttagtcgaagaacgagccaaactaatgaactttcaaaaaattaaccaagcgttgcaagccagtcacacgattttagcaggagaagacgggaatgcgttagaccaaatcgcagttgcaatgaatcagatgcaagaaattgctgaactcgatccagaattcaagcgtattgcggacagtctgcagactggttattacacgttgcaagatagtagcattgatattagtcgggaagtttcaaacttagaatgggatgaagcacggttagatgaaatcgaacaacggctagaaactattaataatttggaacataagtatggtgattcaattgccgaaattctcgcttatggtgaaaaaatcggggctgaactagcagcgatgcaagcaactgaagcgaacgcaagtgagttggagcagcaattcacgcaacttgaacaacaacttaggacaaacggacaaacgttgacacaattacgccaaaaagcagctaagcaacttgaaaaagcggttcatcaacagttaaaagcgttatacatggaaaagacggtctttaaagttgaattcttgccaaatgaacaggaacagttcatggcctccgggatggacaaagttgaattttacattcaacccaaccctggtgaaaaactacggccgctcgctaaaattgcttctggtggggaattatcgcgcttgatgttagcccttaaaacgattttctccgaatcacaaggcgttactagcatcatctttgatgaagttgataccggagtgagtgggcgtgtggcccaagcaattgccaataagattagtgaaattggccaacattcgcaagtgctctgcattacgcatttgccgcaagtcgcagcaatgagtgatcatcagtatcaaattcaaaaacaggtaaaacaaaatcgaacggaaacgtccgttcaaaaagtaaccggtaaacaacggattgctgaactggcgcggatgttagcggggactgaagtaacagagttaactttagaacatgccgaagaattagtggcattagcggaaacggctaagcaaagtcgccgacattaaaataagggtgcagccaaaatatttttttggctgcacccttatttttttgcttaacttttcttttgaatgtaacgaatttgattgcaaaggacaatcttgtagaggttcgaacgacactcttttagcagatacttgttcgcactgagttgtttaaccaagcgcccggtcacttgttcgagatgatcgttaacattgaattgcaccgcaacatggtagtggcgttcaaacgcttgggtcataaataattgaatctgagcaggttgcatttggggttgttcaacaaaagcagtcgcttctggtgtaagttcaaaaaagcggtgatattgtttaaccaattgttgactgagtccgctaaccgttgcttgtttaaattccatgatttcatcctccgaacacttgtttgtgtttttattatacgaacaaatgttcagaattgcaagcggcattttttgatttttttcgtgtataataggatgagctgatagaaagggtgatttgatgggcaaaattgaatatgaaattatggcagaaatcggtgtgttgagtgaaaatccagccggttggcgtaaagaattgaatttaatctcttggaatcaacgtgcaccaaaatttgatttgcgagattgggcaccggatcatgccaaaatgggtaagggtgtgacgctgtcaaacgacgaaattgcgtccttaaggttaattttaaatgagatggaaacaaagtagacttgaaatttcccgccaaatagtgcaaaatagactttaactattttataaaagaagagggaattacgtagatgtccaatcgaggaatgttgatcgttttatcaggcccatcaggggtcggtaaaggaactgtccgtcaagcaatgctagaagatgaatttcgtgattttcactattcagtttcgatgacgacgagaaagccaagaccaggcgaacaagatggtgttgactattattttgtgagcaaagaagaattcgagcaagaaattgcaaatgatggtatgctagagtatgcacagtacgtggataattattatggcacaccgatgaagtatgtgaatcagacactagactcagggcgcgatgttttattagaaatcgaagtccaaggcgcaatgcaagtgcgcgagaagtgtcccgatggcgtcttcatcttcttgacaccacccgatttattagaattgcggaatcgaattcaaaaacgcggcacagacgatcaagccacgattgataagcggatgcaaaaagcagccgacgaaatcaagatgatggaaaattacgattatgctgtcgtcaacgacgaaattccaaatgcggttcaacgaatcgaaaagattatcgaaagtgaacacttacgagtgccacgtgtgatcgaccaatacaagaaaatgataggggaataataatatgattgtatatccttcaattgataagttactagaaaacgtgaactcacgttactcattggctgttttagctagcaagcgggcccatgaaatcgaagccggtgatattaagatgttatctgaatacaaatcacctaaaacggttgggatggcaatggaagaaattgctgctggcaatgtcattattgatcctgattcattgatgcttgaaaaagatgctgaaaaaatggataagctcgctcaaaaagacggcgaataagaataattaaagaacctgcatgtttagtttattcatcgatggatgtttaaattaaagtgcagtttttttagttttagggggttttgaaagtggatttaacgaataaacgaattgcagtttatgtgacaggtggcattgccgtctacaaagtggctaatttggtgcgcggattgattaaagcaggtgctgaggtccaagtggcaatgactcaggcggcaaccgaatttgtcacgccactgacgtttgccacattaacgcgtaaacccgtgttaactgatttgtttaatcaagaccaaccggatcgggttgcccatattcacttagcggattggactaatctggcggtgattactccggcgactgctaatctaatcgggaaactcgctaatgggattgctgacgactttgtctcgaccgccttgttagccactaccgcgcccaaattaattgtgccggcgatgaatgaacatatgtggtttaatccagctacccaacggaatttaacccaacttaaagcagatggctatactgtcatggaaccggataccggctttttagcggaaggctatgctggcgtcgggcggttccctgaagaaaccgcgattatggcagaagttgcgcaacaattcggaccgcaacggttaagcgggcagaacgtggtggtgactgccggtgggacacaagaaccaattgatccggtacgctacattggcaaccggtcttctggtaaaatggggtatgcagtggcccaagcagccgtgacgatgggggcgaatgtgatcctcatcagcacgcgtccagaattgccagtcccggctggtttgcacaaaataatttacgttgaaacggcggcgcaattacaaggcacagttagcagtgtctttgaaggggccgatgttgtggtgatggctgcggcggttgccgattttaaaccggcccaatatgtcacgcacaaaatcaaaaaacaaccgaacacaactgagatgcagttaactttagaccgtaccccagatattttggcgacgcttgggcagcagaagacgcatcaattcttggtcggattcgcggcagaaacagatgatttactacaaaatgcccaaaccaaactagcagctaaaaatgttgatttactcgtggcgaacgatgtcagtcagcatgatcggggctttggtgttgatcaaaatgcggttacgcttttacaaccgaatgcagcaccggaaacattagcgttggcggataaaagggtgattgcgactcaaattctagaacgagttgctgacttgttagattaactaaaaaggaggatttagatgccacaaatcgcaaaagtgattgtcgatgtgccgacgatgcaaactaatcggccatacgattaccaagtaccggatactttatcagacagtattcaacctgggatgcgtgtggcggttccttttggcaaaggtgatcgattaattcaaggctttattttgtccattcaagatcaagccaattttgaggggcaattaaagccgattacggcggtcattgatttacaaccggctgtgaattcagaattacttcaattatcaagttggttggcagagcggacctatgcctttcagattacgtgcttgcaaacgatgctcccaagtgtgatgcgtgctaagtattctaagaccgcgcaactagttgatgaaattgatccagccttacaagcaagcctgttcaatggtaacgacgaattaacgtttgaccagtcgctagatcccgaaaagttaaaacaattgatgcagttacaacgccaagggaaaatcgaagtggtctaccatgtcgatgatcgcgcccgcgtgaagcaattaacggcgattgaaccggcattatcgtttgaacagttagaagaagcgcgggccggcttacgtaagtcagcgcaaaagcagagtcaactcattagttatttacaaagtttaattgatcagcccaatcccttattaaaggatgttttggccaagacgacttttacccgggagaatatcaagacaggcgccgacaaaggttggttacgccaagttaaagttgaagcttaccgaaatccttatcctaaaaccgtcacaacgacgcaaaaaatggcgttgactgatgaacaggctgatgcggtagaagccgttgtagcggctactaaggcccaatctgatcgggtttttctagtcgaagggattacgggcagcggtaagaccgaagtctatttacaaacgattgatgcggtcttgcaacaggggaaaactgcattaatgttagtccctgaaattgctttgaccccgcagatggtcaaacgcgtgaagggtcgctttggtgatcaagttgccgttttacatagtggcttatccgaaggtgaaaagtatgatgaatggcggcgaattgaacgcaaagaagctagcgttgtcgttggggcgcgctcagccgtttttgcaccattggagaatattggtgtgattatcatggatgaagaacatgaagcttcctataaacaagatgaaagtccgcgctatcatgcccgcgatgttgccatctggcggagtcagtaccatcattgcccagtgattctcgggagtgcaacaccatcgcttgaatcgcgtgcccgtgcccaaaaaggcgtctaccaactcttgcgcctgacgcaacggattaatcaacagccattaccggcagttgagttggttgatatgcgcgaggcgatgaagcaacaagccagcagcaatttttcacctgcgctattagatgcgttaaaggatcggttgcaaaagggcgaacagagcgtcctcttattaaatcggcgcggtttttcatcctttatcatgtgtcgcgattgtggctttgtcttgcagtgtcccaactgtgatatctcactcacgttgcatatggatacgcactcgatgaagtgccattactgtggtcatgaagaagcaattccgcggacttgtccaaattgtcagagtcgccagattcgctatttcggaacgggaacacaaaaagttgaagcagaactccaagagctgattccaaatgcccgtattctgcgcatggacgttgatacaacccgcaaaaaaggtgcgcacgctaaattactcaaacgctttggcgaccacgatgccgatattttattgggcacgcagatgattgccaaagggcttgatttccctgatgtaacgttagtcggcgtgattaacgccgataccgcccttgggttacctgattttcgggcaagtgagcgcacgttccaattattgacgcaagtcagtggccgtgctggtcgtgccgataaaaccggtgcggtaatcgtgcaatcttttaatccggaaaattacgccatccaatttgccaagcaacatgattatgaaggcttctatcagtatgagatggcagtccgccatcggggcggctatccgccgtattattttacggtacagttaacgattagccatcctgaagaagcgttggcagccaagaagagtttccacattgcccgtcaattacggcccgtcttatccgaccaagcgattgtgctgggtccgacgccgaagtcgattgcgcggattaataatcgttatttctatcaaattgtgattaaatataaacaggaaccacaacttcaggcgaaactcgccgagattctcgaaacgacccaaattgatacccgtcatggtttcaagattgggttggacaatgaacccctacaatttacttaaagtgagcgtgattgattaatgacatccatcgtatttatggggactccccaattttcagtaccgattttagaagcccttgtggcacacgattatcaagtcctagccgttgtgacccaaccagaccggaaagttggccgcaagcaagtcttacaacaaacacccgttaaagaagcggctgttcgcttaaacctgactgtttttcaacctgaaaaactcagtggtagtcaagaattagcggacgtgatggccttgcaaccagatttaattgtgacggcagcatatggtcaattcttgccaacgaagttattagaagccgctaagattgcagccatcaatgtgcatggttcactcttgccaaaatatcgtggtggtgcacccattcaatatgctgtgttaaacggcgattcagaaattgggattaccatcatgcatatggctaaaaaaatggatgccggtgatatgattgaacaagccagcattccaattgaagcttcagacgacaccgggactttatttgataagttaagttatgtcggtcgagatctattattgaagacattaccaagcattatcgatcaaaccgcgccccggacaccacaagatgaagcacaagtaacgtttgcttacaatattactaaggaacaagaacaattagatatcgagcaaccagcaacgcaactggtcaaccagattcgtgcgttacggccacaaccaggcgcttggttgccaattaatggtcaacggacaaaattatggcaagcaactgttgctgaaacaacgacggatcaaccagccggtgtgattgtcgctatcaacaaaaaggatttcgaattagcagccggcaatggcagtgttttgaagattaccgagattcaaccagctggtaaggctaaaatgccggtccaatctttcttaaacggggttggcaaacaactcgcagtcggacaacaagtggtggtgcaagatgcctaaaaagacaccacgctatttagctgttgaaattttaacggcggttgccaaacaaaacagttattcaaacttggccctcgaccaagtgattaaacaaaaccacttgaatccccaagatgctggttttttaacgcagctcgtgtatggtgtgattcaacatgaaatgacactcgattattacctagccccctttattcaaaaaccagctaaactggcaacttgggtccgccaagtcttacggacggcagtttttcaacaggtttatttggatcgtgttcctgaacatgcgattttttatgaagcaactgagattgccaaacaaatgggccatgctggcacggctaagttggtcaccgcaattctacggaaccaacaacggactggattgcctgatttagcagcaattgccgatccaatcgaacgcctaagtgtgacttacagtatgccgcagtggttagtggcgaagttccaccaagaattagggcaatcaaaattggaacacttattggcaacgattaaccaaccagcgaatgcgtccattcgagtcaatacccgtgttaattcagttgatgccgttttggcagacttacaggctgacgggttaacgattgaatcgagtgtaattgtagccgctggattagttgcccacggcggtcacttagccagcggtgaattgttcgaacaaggcgcgtatataattcaagatgaaagctcgatgttagtggcaccaagtttgcaactacaaccaagtgatcggatcttggatgcttgtgcagccccaggtgggaaaacgacacatatggcgacttatttggatgccagtcaaggggggcaaattactgccttagacattcatgaacataaagtccgcttgattgagcaaaacgctaagcgtttgcatgttgcagacgtcattgatgcgcgggcgctcgatgcacgcaaagtcggtgaacaatttgaacctgaaacatttgataagattttagtcgatgcaccatgttctggcttaggcttaatgcgacgtaaaccggaaatcaagtatggtcgccaagcagcagacttattgaaccttcagaagattcaattggcgattttagaagccgttgcaccaaccttaaaagtgggtggtcaattgacttacagtacctgtacgattgtcccagaagaaaatcaacaagttgttgcggcttttgtggccaatcatccagaatttgaaatcgtaccagtagcactcgacaaaccattgccagccaatcaagcgacaccgtttgtccaaatctatcccgatgattatcaaacagacggctttttcatcgcttgtttaacacgacgggcttaaattattaattgaggtgaattcttatgaaagttgcttttcaaaccgatgtcggccaacaacgccaaaataatcaggactatgtcggcttttataccaataaaagcggtgcgcagtttgcgattgttgctgatgggatgggcggtcatttaggcggcgatgttgcttcagaaatggcggtttcccatattgggtacgagttcgaacgaactgatgataccgacattgaatccatggttaaatggttaattttcgaattacaaaaagaaaacaaacatattttagcgaaggctaatcagtatgatgatttgtttgggatgggcaccacgctcgtcgcagtgttgatttcaggtgccaattacttagttgccaatattggcgacagccgagtgtatcgcttccggaataacgaactccgccaattaacagaggaccattccttggtaaatgaattggtgaaacaaggggagttaaccgaagaagcggcaaagcatcatccgcaaaaaaacatcattacgcgcacattaggcgtttcgcaagatgtcgatgccgatgtaacaatttacgaatttgaaccagatgattatctattattatgtacagatgggctaaccaatatggtcgatgatgaacaaattaagaccacgctgatgacaccgacatcgctggaagaaaaatgtgcggcattaattcaacaagcaaatgatgccggtggcttagataatattacggcgttaatcttacatcaaactggtgaggagggtgcgcgatgatggagacaggctacgcggtcaatggccgctatcagattatccgtccaattggagaaggtggcatggccaacgtttatctggcccaagatctgattttggatcgccaagtagcggtcaaggtgctgcgacttgatttacggaacgatccgaacacggtacgtcgctttaaacgcgaagcacttgccacaactgaattgaaccaccccaatatcgtcagtatctatgatgttggtgaagaaaacagcatgcaatacatcgtgatggaatatgtgaagggaacagatttaaagaagcatatcgttgaacacttcccgattccttatcaacgcgtcgtcgatattatgacgcagattttatcagcggtcgaaaatgcccacgcgcacgatattattcatcgtgatttgaaaccacagaatatcttggtcgatgaagcaggtaacgttaagattagcgattttgggattgcgattgcgctcagtgaaaccgcgatgacccagaccaatacattactcggatcagtgcattatttatcaccagagcaagcacggggttcaatggcaacgaaacgttcagacatctattcactcgggattattctgtatgaaatgttaacgggtatggtgccatttgaaggtgaatcggctgtttccatcgcgattaaacattttcaagatgctgtaccacccgttcgagattatgatccgcggattccacaagctttggaaaacgttgtgttaaaagcaactgccaaagatccggacgaacgctacagtgatgttgggcaaatgaccactgatttgagtacctcattatcagctagtcgggcgcatgaaccgaaattcgtgccctcacaaggtgatatgggtgaaacaaaggtgattccggctctcgacccagaagggattacgcgccaaaacgatgcgccagaagccaaacccaaagatgagactgaagtaaaagacgatcagaaaaagaaacagccgcataagaagtcgaagcggaaatggtggtttgtggggcttggcgtagtcttgttagtgatgctcggggtcttcgctgcgtacgcaatgcaaggcagtgaagtgactgttccagatgtgacagacatgacgcaagaaaacgcgactgcagcattaaccgcagataaattaaaagttggtaagattcaaaaaactactagcaataagtacagcaaagggcatgtgattttatcgacgcctggtaaaggaatgcatgttaaatcgggcagtacggttgatctaacaatcagtacgggtcgtaaaaagtatgagatcgaagactatacggacaaaccgttcacagatgtcagcacgttattgaaacaaaagggactgacggttgtgcgcaaatatcagagttcacgcagtgttgcttcgggactggttttagaccaaagcattgccgcaggtgaaaaagttgtcccaagtaagacgacgattaccttgactgtcagcagcggcaagccaagcattactttacgcaatttgagtaattacacgaaacaggctgttcaagactatgttgatgacgttggtttgacggttactttttcagaggattactccaatacgattgatgaagggttagtcattagccaatcacctggtagtggtgcatctattcaagaaggtgccaatattaacgtggtactttctaaaggtaaaaaagcgcccgctaccaagagttttacgaagtcgattacgattccgtttgataattccttagcaacttcacaaagtagtacaagcagctcgagcgaatcgggtgacagtagtagtacgagctctagttcaagtagtacttcaacggctacgacgaataagattacgatttatttagaagatagcacgcattcaataatgagtgtttataaagaaatgacgattaccgcggatacaaccgttgaattgccatttacgattaaagcggaccaagccggccgtttccggattttaagaaatggtcaagagattctatctgatgaccatgtgacaaactaattgggaggtgacctattgcagacaggacagattattcgcgccctcagtgggttttatgatgtacaaagtgaaggcaaaatttatcgaacgcgtgcgcgtggtaatttccgtaaacggaaaattacgccacttgtcggtgattttgtcgaattcgagagtgaaagtgaaacagaaagtggctatattcttgagattttagaccgtaaaaatgagatgattcgaccaccagtcgctaatattgataatgctgtcgtaattgtttcggcggtggaaccagcattctccttgaatttgttggatcgcttcttgatttatattgaatcgctgcacatgcaagggttagtttatttaaccaagaccgatatgattagtgatcaacaataccaagaaattagtgattacttggcgtattacgcgaagatcggctatcaaatttttgcaccgcggaccgcctttacaccggagataattacggcaattgaagacacgttcccgcataaaacaaccgtctttacaggacaaacgggggccggtaagtcaacgttgttaaaccacattgacccgagcttgaatattgcaactgccgaaatttcgcagagtttaaatcgtgggaaacatacaacccggcatattgaactgattccgttgaatgatgggttagttggtgatacgcctggcttttcatcacttggtttattaaacgtcacgattgaaaccttggttgaccgattcccagagttcagagaaatcgggcaaggatgcaagtttagaacgtgtcaacacgtgatggaaccgaaatgtgccgtgaaagaagctgtcgacagtggcgaaattatgcaaagtcgttatacgaattatttacagtttagagcagaattaaaggatattcggccagtttacaagaagtcaaaataaaaatgtgatcggagttttgatgatgaaacaaatcgcaccttcaattttaagcgcagactttatgaacttacaaagagacgtccaaaaccttgaaaaggcgggcgctgatctattacatgtggatatcatggatgggatgtttgtccccaacatgtcgtttggcccccaagtagtaactggcttgcggccattgacaacgttaggcttagatgtccatttaatggtcgaacaaccagaacgctacatcgaacaatttgcagcagctggttcagacttaatcatgattcatgccgaagcaacgcaacatctctaccgtggtcttcagatgattaaagatgctggtgttaaagcaggtgtggtgatcaatccagggacaccagtcagtgcgattgaaccagtcttatcattggttgatcaagtcttagtaatgacggttaatcccggttttggtgggcagaagtttattccagcgatgttggataaggtcactgaattagcgacttatcgcgatcaacatgctgatgcagattatacgattgaagtcgatggtggggttaacgaccaaaccgtcggtgcgtgtgccaaagcaggcgcagatgttttcgttgccggttcatatacgtttgccggtgatttagcaacccggattgcaactttaaagcaggctgctcatgacgcggattaatgtgttggtgggaggaccagtcagtgagtgggcccccgaattggcgcagccagaaatgattgatggtcaatgggtgacagcagaccgtggtacgtggcgcttattgcaaaaaggcgtaacacctgtcgtgtcagtcggcgattttgattcattgacggcggctgagcggaccaccgttcaatcagcagtaaaggatattcgctctgtgcaagcagaaaaagatgataccgacactcagttggcattatcaattgcgctaactgaatttaatgcggatcaagttgtgctttatggcgcaacaggcggtcggttggaccattttcttgctaatctctttatgcccttagaaacacgttttaagccgtttttagaccgcttagagatgcgcgatcggcaaaatacgattcggttctatgcaccagggacgtatcaattacaaaaagaagccgataaacggtatctggcctttgtgccattagttcccacaactggtttaaatttaattgatgaaaaatatcgcttggtggattaccaaacgcaagtcccgatttcatgggctagtaatgagttcatcggtgagaccggccaattcagttttgaaactggggtggttgcggtgattcaaagtaaggattaaaaagacggctcggataaaattattttatccgagccgtctttttggttgccataaacgtgttcgatcagtcatctcccgatgattagccgacttatctcgtactctttgccaaaaaaaatagaccgccaactggcggtctatcaattgaaattatacacgagttactttgcctgatttcaaagcacgggctgaaacccaaacacgtttaggtttgccatcaactaagatacgtactttttgtaaatttggcttccaagaacgacgagatgcgttcaaagcgtgtgaacgcttgttgccaaatgatgttttacggccggtaataacgtcttttgccatggtcttattcctcctttaagtaaagccggtagaattaacgagaaacataatatgattcagttagtcttaatagttgcatgcatgcacaccggcttatacaattcacttaaataatttaccataatagtttggggaatgcaagagctctttcaaggaaatttacttgacagtccaaaataagtcgtttaaactcattaaagtccaaaaataagccgcatttggggaagaattcatcaccagttgctttgcaactcttctccgctatgctaaaataacaataagtatggcacaaggaggctattttaatggctgttaaaattaaaacacaatatggcgatattgatattaccaataacgtgattgcaaccgtcgttggtggtgctgcaacagatatctacggaattgttgggatggcaagtaagaatcaaatccgtgacaatttaaacgatattttgaatcgtgagaattataatcggggtgtcgtagtccgtcaagaagacaatggcgttgcgattgatgtctatattattgttggttacggcattaagatctctgaagtttgccgtaacgtccagagtaaagtgaagtacaatcttgaaacaatgttgggtgtcagtgcgaactcagtgaatatttatgttcaaggtgtacgggtattagaagactaaaactaattagcggagctggccactaggtccagttctatttgtttttgttcaaggaggaacattcgtgaaagttactgaaatcacagcagcagaattccaagcaatgatgcgggttgctgcacatcggcttactaaaaatgcagaatttgtcaattcattaaacgtctttccagtgcctgatggggatactgggaccaatatgagtttaacgtttcaaagtggggccaaagcagttaatgaaaacaacgcgcaatctgtcggtgaattatctaagagtttagccaaggggcttttgatgggcgctcggggtaactccggggttatcagttcacaaattttccgtggtttttctaagagcatggctgaaaaagaaacgttggatgcacaagatttggctgacgcattcacaaatggtgttcaaacggcttataaagcagtaatgaaacccgttgaaggcacgattttgacggttgccagaaaaggcgccaaagctggtgccaaggttgccggtcaaactgatgatatcggtgcagttatcgaagctgttgttgagggttctaagaaggccttgttgaagacccctgaattactccctgtcttaaaagaagtcggcgttgtcgattctggtggtcaaggattggtcttcatctatgaaggtttcttagaaggtttaacaggccaagcacctgcaaaagatctttacacacctgatgaagcggaaatggatgaaatggtcaatgccaatcatcatcaaaccgctcaaatgggtacagaagatattgaaaatggttattgtactgaaatcatggtcgcccttggtgacgggacaactgtcgatcgcgaatttgattatgatgaattccgcaatcatttaaacggtgttggtgactctctcttagtggtagccgatgaagaagtggtgaaggtccatgtgcatacagaacatccagggacagtcatggcttacggccaacactttggttcattagtgaagattaaagtcgataacatgcgtttacaacatgatacgattgttgaaaacgaccaacaagctgctgcccctgtgcaagcagaacctgttgaaaatgggattatcgcgattgcggccggtgatgggattgctgaactcttcaagagtttaggggctacttatatcttaagtggtggtcaaaccatgaatccaagtacgcaagatattttagatgcgattaaagcagccaatgctaaacaagtgatcttattaccaaataataagaacatcttcttagccgctgaacaagctgccgaagtggctgatattccagttgcaatcgtgcaaagtcggacgattgctcaagggatgaccgctctcttatcatttgacccatctgctgaattggctgctaatcaagaagccatgacagaggcgttagataccgtgattagtggtcaagtaacgcaatcaatccgggacacgactttagatggacttgaaattaagaaagacgattacatggggattatcgatggtaagattaaggtctcaacggctgaacgtttaacagcagccattgaaatggtccaaacaatgcttgatgaagacagtgaaatcgtcacaattattatcggggaagacggcgatgcaacagaagctgaacaaatcagtgatgcaattatggcccaagacccagaattagaagttgaagtacacgaagggaatcaaccagtttacccatacttgatttcagttgaatagttaatcaaataaaacgggaatgaggttgaatatacctggttcccgttttttagtagaagtacgtttaaccttggaatatggttaaaaagcacgttaagaaaaagaagtgtatcaaaagtgcttatcctgtgaggattagtttaattagccgaatgactagcgtagctacttgtttggctaatggtgctaaacgcaacaggatgcttttgaaagcacgttacaggaggctgtcaatgttaagtttaacggattctgttgctgtgttagctggcgtcggcccgaaacgtctgacagccctcgatcagcttggcataaggaccattagtgatttattgtattattttccgtttcgttacgaagatttgaaggtcaaggatttatccgaagcggcagatcaggaaaaggtgacgttaaaaggaacggtcgtcgctgatccggtcatcagtcgttggggaccagggaagacccggctgaatgtacggctcttgattgaacatgacgttgtgatggttactttttttaatcaaccctatcttaaggacaaatttgaagccggggtcgatgtcgctatttatggcaagtgggatgctaaacgtcatacattgacggggatgaaggtcctagcggttcaatcggctgagaatccatcgtttgcggccatctattccgttaataaaagtgtgcgtcaagggacactggtcaagatgattcaagaagcctttgatttgtatcaggacgttattcccgaattgatcccagaggatattcgcacgcgctataagttaatgaacgaacgcgacttaattgctggcatgcatttccctaaaacgtatcctgaagcaaagcaagcacgccgaagcgctatttttcatgagttcttcctatatcagattcaattacaagccattaaacaggctgatcggcatgtggcaaacggtttagctttgcagtaccaaaatgaagcacttaaagattttattcaaaccttaccgtttgatttaaccgatgcacaaaagcgagtggtgaatgaaatttgtcttgatttaaaatcaccagcgcatatgaatcgccttctccaaggggatgttggttctgggaaaacgattgtggcggcgattgcgctgttcgcggcagtgactgcgggttatcaagccgcattgatggtgccaacggaaattctggcggaacaacactatcaaagcttgcaacgcttattggcaccaatgaacgtgactgttggcttattgaccggttcgacgacggctaaagaacggcggacgttgttggcagacattgaatccgggcgcatcaatattattattggcacccatgccttgattcaagatgcagtggtctatcataagttaggctttgctgtaattgatgaacaacatcgtttcggggtcaaccaacggcgaattttgcgtgaaaaggggttacagcctgatattcttgcaatgacggcgaccccgattccgcggacgctggcgattaccgcgtatggcgagatggacgtttcaacgattgatgaattgccaaaaggacggattccaattgaaaccagttgggtgcgtagtaatcaagtcgaacaagccctcagctttgtccgtaaacaacttgcaaacgattcgcaagtctttgcgattacaccgttgattgccgaatctgaacagatggatttaaagaatgccgaggagatttacgcaacgttggtggaacaatttgaacctgattaccatgttgcattgttgcatggccagttaaaagatgatgaaaaaaatcagattatgaacgctttttctgagaacaaaattcaattactggtttcaacaaccgtcgttgaagttggtgtcgatgtgccaaacgcgacggtgatgctcatttttgatgcggatcggttcgggttggcgcaattacatcaattacggggccgggttggccgaggtaagaaaaaggcatactgtattctggtggctgatccgaagaaccaacaaggtgttgaccggatgacgattatgactgaaaccactgatggattcgtcgttgcgcagaaggatttagaattgcgcggaccaggggaagtctttggtgatcgtcaatctggattgcccgtctttaaagttggcgatccagtagccgactttacgagtttacaagtcgcccaacaagaagtgcaaaaaatcttcacgcttgatcctgagttggcagcaccggaccatacgccactcaaaacatacttacaacaacaaaagcaaaattacctaacgttagattgaaaacggaaagaggaatgatgatgaaaattgcagtagacgcaatgggcggcgattttgcaccccaatcagtaattgaaggggtgttacaagcccgctcagaattaacagatgttgaatttacgttgtatggtgatgaagcacaaattaaaccgttgattgatgatatgacgcggttaacgattgtgcataccaccgaaaaaatcaccagcgaagatgaaccagtgcgtgcgattcggcgtaaaaagcaagcttcaatggttctggcggcgcaggcagttaaagatggggaagcagacgcactcttttcactagggaatactggtgcgctcttagcagccggattattcgtgattggtcggattaaagggattgatcgtccaggtttaatgcctaccctaccagccattaattcagatttaggcttcaatatgttagatgttggggccaacgccgaagcaaagccggagcatttgcatcaatatggcttaatggggaacttctacgcacaagacgtccgtggcattcaaaagccgcgaattggtttgttgaataatgggactgaagctggcaagggtgatgagttgcataaggcagcacatcaactactggcagatgatctaacgttaaacttcattggtaacgttgaagcaagtgaactcttaaaaggggttgcggatgtcgtggtcacagatgggtttaccggcaatgcgacgcttaaagcaattgaagggactgccacaatcgtgatgtcgcaagtcaaacatgcgattatggatgctggtgtcaaagaaaaaatcggtggtttactcttgaaaaagagtgttggtgggattcgtgataaattcgacacatctgtttatggcggggctgttttattaggcttaaaagcccctgttgttaaggcgcacggtgctgcagatggccgcacggtttactacactgttcgccagattcatgcaatgctggcgaaccaaacgattcaaaaagtaatcgattattttgaccaacaaaatagcccaaaagaaaccgattaaaataggtggacaatgtgttccaaaggcgctacaatatacttcgcaagtctgatttgatttacttgaattgagttgcgaagttatgtataatcactggatacccaaagtgttaagtacgtaggtaagggtttcaatttggaggtttttaattatgaatgaacaagaaatctttgataagattgcggctattattggcgatcgatttgagttaaataaggatcaggtaacagacgaattgaacttcaaggaagacttggatgctgattcaattgatattgtggaatttgttttggaattagaagacacttttggtgccgaaattccggatgaagaagctgaaaagatcggtacggtagctgatgccgttgcttacattaaaacaaaaatcaaataataaccttaaaaacgagcctgttggttgtgagtattcgcgaccgacaggcttatttttttgcatttgtataatttttcaagaattaaaacaaaactgggttgtaaaagtccgattgaatatcgaatttttacaacctagaaagctgcttaaagtttcgtccaatatttggggttcacttcaaacgctgttttttaatagccggctgacaagtctaccggattgacggataattcacctttgtctaaataactgggtaaattttgatcgaaaattttgaagagccgttcatggatatcagcgatgtaacctgaaatatgtggcgtgataatcaggtttggtgtggcccataatggtgaatcacttggtaatggttcgttttgggcaacatcgattgctgctcctgccaaatgaccggattgtagatagtgcatcaaagctgcttcgtcgactgaagcgccgcgccctaaattgaagaagtaagcccctcgatggagttgcgtaaaaaaggtggtgtcgaagaaccgattggtgaccggtgttaatggcatcacattaatcacgaagtctgcttgtggcaatgcttgttcgtaatccgtgtcggttagaatctgatcaaaattggcaacgggtttctcgtgccgattaacgccaattgtgtgcatacccatgacgtgggcatactttgcaatttcctcaccaatttgacctgttccaaaaatgaggagtgtgcggtgttccaaatttgtcatttgttcaccaatagcatgatgctcccattgatgcgctgcttgtgcgggtaagctctgataaatcccacgggtaaagtgtaatatgtaacttaatgccgtctgtgcgattggttttgcgtgcatcccgcgtgcgtttgataccagtaccccttgcttagctaacgtggctagtggtaaataatcaacccctgagcttgcggtctgaatccattttaattgattaccgggctctgctaaaattttcgggcctacatctttattccaaccaaacataatctcaatactacccagttgacttggttttaaatcagctaaagcgatgattgttaaaccttgtgcagttagtgctttgacgtgttgttcaggaattgtttctgctgataaaatgactgtcaagtcgatccctcaccttattattgaagtaatctttattataagggattttcagtaaataaaaaagcattaccgactgaaaacggcaatgctttataaaaaattttattctttttctgcacgtggccatactggacgaccccagtattggaataaatcagtttgaatccgaccattatacaatttccggcgtttagttgcgcgttgcccgaatgattcttggaattgtaagtcacttgttaaaatatacttactccaagtcttcaatgaccgataggtatcacccatttctttatacaaagcacgggcttgtgtttggtcacttaatcgtttcccgtaaggagggttggcgatgatgaccccgttggttaaatctgtcttgaaatccttaacagcgagttgtttgaactggatatcatgtaaaacaccagcttcgttcgcattcaacttagcgatatcaatcatgttttgatcgatatcataaccaaaaatttcaagtggttggtctttttcggctgctttcgcttcggctttggcattttctaaaacagaagcatcgatccaatcgaagtcttcaaaggcaaacttacgatgcataccgggtgcaatgttgtgcccaattaaagctgcttcgatcgcaatggtcccagaaccagtcgttggatcaacaaatggcatatcaggttgccaacggcttaaaagaattaaggatgccgcgaagttttccttcaatggggcttcccctttttcaaggcggtagccccgcttgaataaactaggaccagttgtatctaagctgatcgtcacgacatcttttaggatgctgacttcaagcggatacgttgcgcctgtttcagctaaacgtgttcggcggtgatagacagtacttaacttatcaacaatcgcttttttagtgatggcttgcacgtctggttcgctatggagcgttgaacggactgagcgaccagcaactggaaaagcggcgtctaatggcaggaacttgtcccatggcaaagctttcacttgttcaaaaaggtcatcgaaggttttggcctcaaattgaccaatcgcgattttcacccgatcagcactgcgtaaccagagattggtttttgcaatatctgccacatcgccttcgaaatacacccggccattatctgaacgtgtttcataaccgagattttgtaattctttggccgtaatggattcaatcccactcgccattgttgcgtatagttggtaagtcatgtttttaaagatccccttaggaaattattttttaaataaaaagagcttgggcaaaagcccaagccacctgattgtaaacctttataggccatgttttgttccagaacttccccaggaagaaagttccttcagtaatcatctatctgttcttacgaactctcatttttagttcatttccataaatgagacgcccctaccaaagtttgggttactcgctcgcggggtttacctcgttccaccgtccaagtttccaaggacgctccgtcactgtggcactatttaaggatattcacgcatgaccgaagttttagcgctttttccgccgttaccgttaaggtaccctggcttattgggccaggcacgaacactacaagcatctcagcctgtgcgggcatggaccttcctcagcctaccgatgtagaccgcgattactcaagatttacaaatattgaatcaatgtttataagtatagcacaagattaaagatttgtctcgtcaaattgtgaatgattttgaactcttgtctgtggagcttgattttgttcacttaacttagcaccgaacacgtggcgttcaaggtttgataagcgtttcaaaatatcatagttggttgctgctgaagcttgttgtggtgcactttccttcacgttatcagaagcgctgagttggcggtttaattcgtcaaccttcttgaataagcgggcattttccgccgttagccgatcgattgcttcttgataagtttgatagtctttaataactaaatcaaggtaaccatcgacttcttcaggttcatagccccgcatttttgttttaaattcttttttcaatatatcagttgggttcaattcgatttcaatttgattgtccattttgacacctcatttagaataaatgtactatgattcccattatagcaaagttatcggataattaaaactcttgctgatctaattccgctaactcagtcgcgatatcttgtagttcgaaaaaatcgaccaagttaatcggataatcttgttggtcttgatattggcgggctgcatgataatcatattctggtttgcccggtgattcacgatcatagtataatagttgaccatccgtatgggtcagcatgaattgttgatactggcgcaattgttgcggtccagaatacggtgcgttaaccactggttcgcaaaaatcgactcgcgctttgagctgactcaattgagcttggttattttcgttccattgttgaccaaaatcattaaacggcaacatcatcgccaattttaaatccggatagtccgtttttagttcaatagcaacttgcagactccactgttcaatccccatttggccaccagtgatcacccactcgagcccatcatctaaatattgtgttaactgcttttttaatgaatatttaattactttaagtttctcgtcagtttcgccaaaaacaccgagttcatagcttcgatagccgctcacccatagtcgtttcaagtcaggtccctcccaaatgattttcaattaaactaaacattgctataatagtgaaacaggagtgtgattttcaatggcctttcattatcctaacggacagccttatacaaataatgagacaaaaccaactaaaaagcaagcccggcaaccagaagcaacaacgttatttggtaaacgcggcatgacgttggaagaagaactcaatgatagtaatcagtattatcgattacatgcaacggctgtcgtgtataagaaaccaacgccaattcagattgtgaaggtcgactaccctgcccgcagccaagcggttattaaagaagcttattttaaacaagcctcaacaactgactataatgggatttatcagggccgttacgtcgattttgaagcgaaggaaacgaagaataaaaccgcgtttccgtttcggaacttccatcaacatcagattgaacatttcagagcctgcttgaatcaaggtggcatctgctttgtcattatgaaatttgtcccgctacaacggctattcttgtatcccgcaacagaactgattagccgctgggacgcgcaagttgatggtgcacgaaaatcgatttcactcagtgatgtgattgacaatgggattgagattaagtaccaacttaatccaattattccctacttagatgccgtagatcagttattaaagcggtcaaataaaggagtttaaagaacaatgtccgataatcgaaacaataataattcgcgagttgcaaggcacaaagctgaagcaaaacccgctaataagaaacgccggcccctctttttaagaattctaaaatggctgttactactgattgtagtggctttcgtggctgggattggtttgtttgcctactatgttaaagatacaccaaacctaacgcaagcggacctgcaaagtccgaatgcgacaattctatacgatgatcaagggaaacctttcaaaacaattggtggcgaaaatcggagttatgtcaagagtgatcaaatcccgcaaacattaaaagatgcagtagtctctattgaagatcgtcgtttctataaagaaaaattcgggattgatccaatccgaattgcgtctgctgcagtcgccaatattactggtaaatcaccgctgggcttacaaggtgggagtactttaacccaacaattgattaaactgtctaaattctcaacgaaaaacagcgatcagactttcagacgaaaagcacaagaagcgtggcttgccgttcaagtcgaacgtcaatattcaaaagaccaaatcttagagtattatatgaacaaagtgtacctgaataacggggtcaatggtatggggacggctgctaagtattattatggcaagtcgttgaaggaattaagtttgccacaactggcattgattgcgggtatgccgcaatcgccaagtaattacgatccgtacctccaccctgatttagcgaagaagcgccgtgatttagttcttgatgcgcttttgcggaacaataagattacagcaactgaagctgccgaagctaaacaagtcccaattaataccggcttagtggatcaacaaacagtagcgaatagttcaacggattctaaagcaaccgacgcttacgtcaaggaagtcctcgccgacttgaagaaaaaaggctatgatccgtacacggctggtttgaaagtctacaccaatatcaatatggacgcgcaacgtaagttatacgatatcgtcaataatgatagcagtattccattcccagatgatcaactacaaacagcagtttcaattacagatcctaataacggtcgaattgttgcgatgattggtggtcgtaaaactggtgatgtgcagctcggttataaccgggccgtgcaatctggccgaagtaatgggtcatcaatgaaaccattaatggattacggtccagctatcgaatatcttgactactcaaccgcacagaaactacaagatgtcccttacacttatcctggaaccaatattcaattgcataactttgatggccgttatctcggtacaattaccgcgcgtaatgcgcttgccaactcacgaaacgtcccagccatcgaactgttagaagctgttggcatgactaaagcccgtgaattcgtgaaaggcttaggcattaacgtgccagctgatactggtctttcttatgggattggtgggaatgtttcaactgttgatgaagctgccgcatatggcgccttcgcaaacggtggaacttactatgcaccaacttatatccataaagtcgaaacagccgatgggattacgcataattatgattctgatggcacacaggctatgaagagttcaacggcctacatgattactgatatgttaaaagatgttattaaaaatggttctgggacgttagcccaaattccagggcttcatcaagctggtaagactgggacaaccgattattctagcgaagaaattgccaaatctgggttaaacccaactttagcgaaggatagctggtttgccggttataccaagaactattcagtgacggtttggactggatacgatgaaccacttaaaaatggattaacaatgagtgagcggaacgtcgccgcttatatctataaagcaatgatggcctacctcgctcaaaacgcaaccaactcagattggtcaatgccaagtaacgtggttgctaaaaacgtggctggcgtacgagaactctatattaaagggacgacgaccattccaagttcttcaagcagtcgatcttcttcaagtagtgtactctactctagctcagaagcaccggtcagctcaagcagtgaaatttctagctcaagtagcgtggttgaaacaccaagtgaatcttccagtgtgccggagacctcatcttcaagcaccccaactgaaagttcacaatcgcaaccttcgacctcaacccctccggcaacaactaatccaggaacggggtcgacgacacaaacaccagcagcgccaactaactaaaagaagcaccgttcagttcaacgataaacgttggctgaacggtgctttttttgcgttttttaaccacgatcttcaagaaattgttggcctgcttggcaaatccttaataagggacactcatcgcaatgcggcttacgtgccgtacagacttgccgcccaaaaagaatgagtgtgtggtgcgcttgaacccatgttttcttaggaagcttcgcttgaaagtccttttcaatctggatcaccgaggcatcctgtgcactgattttgagccgtttggcaatccgagtgacatgcgtatcgacggcaaatgatgggacgttaaaggcgtcacctaaaacgacattcgcggtcttacggccaacaccagcaagttgttccaattcggcatgtgtgcgcggcacttccccaccaaaatctgccattagttgctggcagcatgttttaatgtgtttagctttattatgatataacccgattgaatgaatatcagcctcaatatcggcaatctctgcattcgcgaaactagctggtgtcgggaaatcagcaaatagttgtggggtgaccttattgacggaaacgtcggtggcttgtgcgctaagcatcaccgcaatcaacaattgaaacggtgaatcagcaactaatgcgccctgcgcatctggaattaaattgtatagttggtgcatggcccactgtgttttggcttttgataacatccgcttcatctcctattcgattaacgtcttggatgggccttttggtaagcttgtagggattctttatcagtaatattttgtttctgccagttgagcaaaatcttatcaacgtacttcaaggaatagacttgatttaaaacggattctcgcacggctaattgaatcaattctggttgataatgatctaaatctaaccagttggcaacaatctcagattccaatggcgataatgggcggccaagagcttgttcaacttggttaaagaccgcactccgttggttaccgtctagtgcttgttgagtgacttgtgcgtcttgaacggctagcacgctcaatttagttaaggctggtgtgagatcgtaatggtcttcagccttaccttgttcattgacagatgatttaagggtaattagttttttctgtaaaagttgatgaatcaatgcgtaaatttggctggattcaattcccatgcgttcaccaatcacagctaaatcgggaaagtcattgttttgactggcaaaatcactgagctgtaagtaaaccactaattcttcagaagacatcttgagcgtttgatagtgatgcagtaacagtcgagagacactcaattggccgccttgtaaaaacgcggtaagttcgttcatattctagccttcttttctaaaagtttcattagttctattgtaaccaattttagacaaataaaaaagcgccgagaacctgatttcggttcacggcgctttagttaatcctcaaagccaactcgtttgagtcagcactctgatttgaaacatgcttttgaaagtagtcctcggtgctttgctacgtccagcaaacgatcgacttgcgtcgctcattcactagactagacaaatgctcgagaactaaccactttcaacgcactctaattcaaacgtgcttttgtagctaggttcctgcgcttaacaatgattgtcaaataatcgattgcatcgattattcgccaaccaacgttaatgctcagaacctaaccagctacaacgcactctatttgaaacgtgcttcttcgaactgccttttccggttaactgtaaaacgggcaccatggctgtgaagcgccataatgcccgttttgctgttaatcctcaaagtcaactcgttcgagtcagcactctttatggtttgattctgttaatcattcttgggaatggaattgtttcacgtaaatgatcgataccacagatccatgtaatggcccgttctagacctaatccgaaaccagaatgtggcactgatccgtaacgacgtaagtctaagtaccattgatattcttcaaggtctaagcccattgctttaatttcagcttctaatttatcaaagtcagtttcacgttcactaccaccgataatttcaccataaccttctggtgccaataaatcagcacataagtaaacatcatcacgtgttggatgtggcttcatatagaaaggtttgatggcttttggataattcaaaatgaagactggttgttcaaattgatccgataaataagtttcatctggtgcgccaaaatcatcgccccatttaatatcgaagtcagctgcttgtaacatttcaacagccttatcgtatgaaatacgtggatacggtgttttagtatatttcttcaattggtcaacatcacggtccaataattttaattcataggcacagtgatcaatgacgttttgaacaaggtaagccacgtatttttcttggacttcaagactttcatcttgagttgtgaaggccatttctggttcaatcatccagaactcagtcaaatgacgacgagttttggatttttcagcacggaaaacaggaccaaaagtgaagactttgccaaaggccattgcgccagcttcagcgtataactgaccactttgtgttaaataagcatcgttgtcgaaatattcgatgtggaataattcagttgtcccttcaggggcactacccgtcaagattggtggatccatcttgatgaagccttcttggttaaagaattcataagaagcgcggatgatttcatttctgattttcatgatcgcaaatgggcgttttgaacgtaaccataagtgacggtgatctaataagaattcaatcccatgttctttaggtgtaattggatattcgctgctgtcaccaattaattcgatgtcagaaatttcaatttcataaccaaagtgtgaacgagtatcttcatgaatgacccctgtcacccacatacttgattcttgtttgacatcttttgccaattggaaaacggcttcgcttacttggcttttaacgacaaccccttggaaaaaggcagtgccatcacgtaattggaggaatgaaatcttcccacttgaacgtttgtcggttaaccaaacgccaattttaacttcttcatcgacatggttttttgcatcgataatactgatttttttaaccataaactctgtctccttatgtgcaacatttaatttacaacagttcaaaataactgatagttattattatataacaaaaccctgacaaccacagccccctaattgagaaccctagatattttcaatcaattgaatcgtcttcccggttttaaaatcgagggttaaataacaaagacggcctttgtcacttttatagacaacttcccaaacaggcttgttgcggtacataccgaagttaatgttcagtactttttgcggatttttaattgaccatgtcttttctaacgcatcgtttttagaaataccaccactttgacgatagacagtggcatgattgcctttttcgttgattaaaacgaagatgccgtgattatcacggtctttaccactaacggtataatatgttgcatttcgatgatacgtgtagaacccatcaggctcttttaatttcgcgtattttttagcaatgttaacggctttggtttcagccgttgcttcgggttttcgagcttgatgataaatcatcagcatgctgccaatgattaccaacaataagaatatccagagccatctcttatatttgcgcacgctgcattctctccttgttcgcttgaataagccttattatagcaaaaaataacggctatcggcgcttaaaaccgaatcttagtgggaatttaaccaaaacaagtcggttaattcccggattattttaaccgacgctgctttttggggcaaacttgtcggtaacgcgcggcgcatttgttgcccatattgggtcgataataaccggggatctaaacaaatgaagacgccgcgatcgttaggggttctgattaagcgcccaaatgcttggcgtagtttaatcgttgcttttggtaaagcctctgctttaaatggattaattccttgggcagaaagttgagcgtaacgaattcgtgtctgcagtgcattcggcgcatcaaatggtaattgaacaagcaccactaattccagtgctgattccggaaaatcaacaccagcaatgaaactgcttgtcgccaacaagattgaatcgtgccccagcataaagcgcttggtaattttctccgcactacccgtaatcccttgggcaagaatctcacgatcaagcgataaaccggcgcggccaagcgcataatacacttgttctaacgcctgattagaattaaagaggactaacgcctgatgcggattgccaactaataacgttaatagctgttcagcaactgcatgatggtactcattgggggctaaattcttttgactaggaccatcttcagcgataaaaaagcgcgcctgtttcttgaagcggaatggactgcgtaatttcttagtcgctagtggttgcgcttcggtaaaaccaagttcacgtttcaaataatcgaagtgcccattaaccgcaagggttgcgccagtcaaggtgactggttcaaagtgcgcgaggatctgttgcatttgcggaccagctgaaagcaattgccactggagcttaaactgtggtaactgactaggttgtttaggctgtgtcatctgaatcattaacgcgtgttgttcctgcggtttcgtcgcaatgaataattgctcaaaccgttgataggcttcaacatccgccaacaataggttgatttcgttttcaaatgactgccaaatccccaaatccccctctgtatattgttctaaccgctgttcaagccagtaacgcaacgcgagaaaatgatcttgaatggtcaacagttggcggttcagttggtcgaattgattatgacaagcggtgacaaattgaaccacttcatctggattcaaataacgttcactaaacgcttgatgcgcttctggttgcggtagttcaaacgctgtggttaggtatgtctctaagtcactgatggttcggcctaacttggttaagtttttatgcactaaccgtaacgagcgggcttgcggtgattttttcgggaaaagccgggctaaattattattggcctgttccggatccgtatattgcaaccctttttgagaccaaagttgccaacgtgaaagtgaccaatcttgttgcgcaattttttgaacattgaaaatcatattttgtgcttcatctaagaccaagtatggtcgcgcaccccaggtttggtgatcattcgcgtgctctgccaggtaggcgtggttggtgacgagtaattcggcttgttgctggcgcttatgcaggcgacgtaagaaatcatcttgataaaacggcgcttgtggttgcagacttgttaatccccggtgttgcacgttattgaaaaatggtgtttggtaactcgttaaattgagttcatccaaatcccccgttgttgtttgggttagccaaactaagattttcatctgaagcaaccgcaccatccgattcttatgtggtaaacggagcgataattcaaagcgatgcaaatccaaatagtgacgcgggctcttaacgatttcggcattaatttggcgacctactaatttttcaagaagcggtctggcctgcgttaaaatctgatcctgtagcagcgttgtcgatgttgcaaccactaatttgtgttcaggcgtcatgcgataactataggggagtaaatacccgatggtcttccctaacccggtggctgcttcaattaatagtggttcaggtgcctcagattcgaaattatcgtgaatcatatccatcatggcagcttgcgctttacgccatttcaagtggggttttaataatcgttttttatcagcttcttccactggataatcagccgcaaaattagatcccggatagatttcaaatgattcctcggctggttttcgtagggcaatgttttcacgaattaagagatcgttcggcagcggtctcgattgcgcatgcatctgctcggcaatcgctgtgaagaaatcccctgtttgacgtaacaagcccgcgcctaacgcactaagacgttctagggtaactaatggcagggtcttcagccgtgccattaattttaagaataatttagccgttaccaaggcatcgctgtcagcttgatgaggattgtcatgttcgatggcgagtaactgtgtgaggtcttgtaatcgatagctcggtgcttccggcaatacgatctgagccagttcaacagtatcgatgcccggcaaatcaagtggcggttgccccacgcgttctaattcgccatttaaaaaaggtaagtcaaagttaatattatgggccacgaaaacagtaccggataagagttcaactaacgttggcgctaaatcttcgaaaatcggtgctaattcgagttgatcagcagtgatatgcgtcaaatgttgaattttagtcggtacgtcgcgaagcggattaacatcttgcgaaatcgtctgaatgattttgccattttgaatgagggcgcatccgaattgaataatgcggtccccttctttaatgtttgtgccagtcgtttctaaatcaacgacggcgtaaattgtctcttggttcatgctgtcaccaatactttactcattattatatcaatcatactatgaatgacgcgtagaaaccagtctagttaatagcgactagttggccaatcgacaatagatagagatatttagcggttaccggccggttagcaatttgcgtcaacgcggcactgtataggttaatttggccggcataccgcgctttaatcgcctcaatggcagcttctggatcagctgggttcacaaaatcagtcttatagtcgaacaaaatacagtcggtatccgtggttacataaccatccataatcccatggattaagacattgtcttgatcttctgggcgtaaaccggcgaataaggatgcagccggtaacaatagtgaaaatgggacttcccgatgaacttgcgctggttcagctaacagttgctgacccaactcgctctcgaagaatgtcatgatagcagcaactttaatttgttgtgcaacattggcagtgaggcttttttgtaaaacaagtcggtcgatgacactttgcacccgatcgatcgttactggttgggttaaatcgatttcttgtaagaccagatgcgtcgccgttccaatttcagccggactcgcttttcgaacagtctgcatgaattgtggttgaggtaattcatcggtcacgtaacgatgggtttgttgcggtgtatcagcgtcaaagcgtaattgccccaactgatcattgtcgggatcttcaaagagccgtttcacttctgaaacagactggtaagctgtcgttttggtggcgccttttgctggataactgaatgttagctggtcttgaatcccgttggctaaatcagttgttaaatcgaccgccttgagtgccacttgttgttgctggctccaatcttgatcatggtgtaaagcacctggtaattcgccaaggcgcgtttcacttgtaaacgttaaattaaattcagttgcgtcatcgctcagaggtaggaatggtgtcccctcttcggtccaatcacgggcttgcggatgacgaattaagctcaatccaatccaatctagtaagttcgtgctagcttgacgaacagaagcgtccaaccgcagatcaggattttgctgtcctttttgccaagttgcaaatagtttcgcttggttatcacaactgcccgcgataatcagccgttgctcggcacgcgttaaagcaacatagagttttcgcatttcttcagcgcgtaacttttgccgtttttgggtcgtgatggttaattctggtagtgttggaatctttaaccgttttttcgcgtctaagtaaacaattccgagtcccgattgatcatcgagcacgtaattttggcgcaagtcttgctcgttaaattgatgattggcatccattagaaagaccaccgggaattctaagcctttactcccatgaatcgtcatcacagagatggcatcttgattggcgagactggttggttgggctaaatccttatcttgtttttgcaaacgttcgataaattggatgaactggaagagccctttaaagccgtttgcttcgtaagtcgcagcgcgttcatagagtgcgtgcaagtttgcttggcgttggcgacctgctggcatcccaccggcgtaatctaaaaagccggtcttttggtaaattgtccagattaaatcaacgagtggccgttgacgtgcaatggctcgtaactcatttaataaggtttggaaatgcgttaatttttcgaagacttgttggccgagttggccggatttttgtgcttcgaactgatcaagataattaaaaacggcttggtaatagtcatccgttttatcattaatccggattaatgcgagttcattttcgttcataccgacaattggtgaccgaagcacgctaaccagtggaatatcttgattgggattatcaataattttcaagaaagatagcatgatttgaatttccgttgtttggaaataattctgcgcatcactaatgacaatcggtaagccgaaccgttggaaataatcaagaatgattaggttgttgttgcgcgttggcgtcaataagacaatatcttgatagcgaattggccggatttcttgcgtatcccgatcccagatggtttcttgattatcaatcattcgtttaattcgctgtgcaactgatgcaatctgaccttcagctttatcaagcttgcccgttgattcttcatcagtcggttttgtttcgtataaaagtaattcagttggctgagttggttgatcgtcaggataataagtcgcaccatattgcaattcagcgttgtgatcgtaatctagctgccctaattggcggtccatgatttgtttaaagactaagttgacgaaatcatcgatattacgccgtgaacggaagttttctgcgagaataatgcgttcactatcgttatctggcttggcgaattcgtcgtacttaccgaggaacaaactcggatcagctaatcgaaaggcatagatggattgtttaacatcccccaccatgaagacgttgcggggtgcttgactagcgatagtttgaatgattgtttcttgtaactggtttgtatcttgatattcatcaaccaggatttcactgaatttattttgatagaacgttcgtgctgcctctgattccggagtgtcaccggccaaaatatccaaacagaaatgttctaaatcgccaaaatctagtaaatagcggcgtttcttctcagcttggaaggcttgcttaaaatcgcgggtaaccgtcactaacttaccgactaactcaccagcgcgccgttgaatctgactggtttgtgcttcgtcaaagacaaaataggttgttaaaagatcgtttagtgcccctttgacattatcgagggcgtttttgatccggtccttgtcatattgttcatcgggttctaatttcttagttcgtttggcgggtcccaattgggcgtcggtcaattgtgtgcgccactgcgcccaacttaaagtggccgcgttggcttgaatggcagttagtgctgcttgtgccgttgcgatagttggcaagtataccgcaaatttctcgtttgtttgacttagttcgttggcgagtgccaagtcttttaaacaggttgccaaggtcgcttctaactttggcagaatcgttgttttgaaataagcactggttgttaggccagtctctggtacctcgtaaggggcggttagagattgtaaccattcatcgggcgctggattggcaccagagaagttaaacagttcgaaaacaatgttggttagcccatcatcgttgcgatcgttcgaaaaattttgcgctaaatcataaaataaggcgtcgtttgactggtaatgttcttcgcgaacgcgttgccaaacttgatcctctaataagagacgttccgcagtatcacttaataaccgaaacgcgggatctaacttaatcacgtagtagaaatgtttaatgacttgtaagcaaaacgcatgcaacgtgctgatttgtgcggtcgggactaggctgagttgctgccgtaagcgttgttgcaccgctttgtcggttgcctcgcttgctttttttcgcagtgccgtttgaatccgttggcgcatttcagatgcggcggcttcggtaaacgtcaccaccaatagtgaatccacatcagtgccattcaagattttttgaatcacgcgttcaactaaaacggttgtcttcccggagcccgccgaggcagaaacgaggatatcatgccccgcgtgatcaacggctgcttgttgggttggtgtaaatcggcgatcactcatgtcgttcttcctccgagttcataattttggctaagacggcttgattatcaagcgcacttaattggcgataattattttctggtaacatcgcatcgaattggaaaatcgatttatatggcgacattgtgagtgcattcgtgcggtcgggccgcataatcggattcaaagcattttcgccagcaaaaatcgcttcccccgctgctttgattagttgatcgttatgggcaattaattgctgtaactcatcaagggtgaccagttgtttcgatttgaatgccccactctttggacgattgaagttaaacagtggtgaatagccactttctaaagctgtatccaagttttcgagtaaggtctcatcgtttaaaattaagccatcatacttaaattgatccagtaataattgatcgagttcgcctttttgtagttgagcgagtttttgtttgttcagttgcttcaatgacattgttgggttttgaaggtgcagataaaaggccccggcaggttttaccttgctttgcgctggtaaaattgctgcttgatcttgcaagacagtttcaaggtatgtcaacatttgcaatgccaaaccatagtatgcatcgcggaagctaaagctgtgttgactggatttgtaatcaacaattcccaggtaggcttggtcgtttaatgtcagttgatcgatccggtcaattttcccccgcaccttaacccgacgttgattgggtaattcgaattctagaccagctaatccttgttgggcaccaacttggccgaataagacttcggttgccaacggttttaagttcgttcgttgactctgatcgcgcaatgtccggctgacgcgtttaattgtttgactcaattgttggcgaatgtagcccattcgtgctgatttattgaggatcttaaattctggttgttcatacgctttttgtaagatttcatccgtcaatgcatcgatttgttgattatcgagatcgggtaagactaagcgttgggcttgaatcatcttgataaattgatctaagacttggtggtagaaatcaccggtatttgcaggtgtcagttcaaaaattgggcgctcgttcagttttaagccgtattttaagaaataagcgtattgattttgatagaactcttctaatttcgagatcgacgtatggatttcattgccatataacccagtgacaatatcgcttgtcagtgcaacgggttggttatggtacgccagactttgaaggagttgattggttaagtagtgactaacaggaaattgttgtaataaacgataaacagtctgccattggtcaggaattagtgtttgcgtcgcttgtgcttgtcgcgcaacttgaatcaaatcgcttaacaaactacgccaagaacccgtaattggcgctgtacttgtcggaatgacttctgctagaacgcgttgctcggttaaatggaagtagtttttaatccggtcgacatagggggataccgtgtagttcgccccttccccattattcaatggataagtgaaatacaatccttcagtaccacttaaaaaggccaagtagttcagataaggttcaaagctcatctgactggcacttggatcagttaagaattgttctgaattgaaccgatcggttaatagttgccgatcatggtcggataataaggcgctggtttcaatctgatcaggcatcacttgatcggtcgcaccaatcataaaggtaattttgcggcgtttagtctgcaccatccctgattcagataaaacgacctggtcgagtgtcgatggaatttgcgcatattgcgccgtattaaacccggccgctagtaaatcccaaaagccctttagttcgaaaggttggtcgcctaataacgtcacatattcatccaacatcgtcataaatgtttgccatgtctgttccggttggccagctaaggcaatttgattggctgcgagtgcttggtcccgccaatttaacaattgtcgatcgacaccttgttcgattaagaattgatagagcactttagcggcatcgcgccctgttttggcactgtctaaccgtttataaaatggtggtaatacggattgaacataatgccgaatccgattgatccgttccgtgagcacttcatcttctgttgttcgaacaccatcttggaaggaaccgaaccgataatattgccaatcggctgcgcttaaccaatcatgcccttcatacccactttttaaaatcagattttcacacaaatcaagatcagcccggaattcagcgactgattgatagtcatctggtattaaaagctccgtcttcaaaagcgccattacatcttcatagcggtagtaatgctctttcacatcaaacaacgctgccaacatcgcaacaagtggatgggccgccattgtttccggtaaatcgcagaagtacggcacttcgtattctgtaaaaatcggcgcaatcattgtttcataaggggctaaatgccgagtcataatcaagaagtctcggtagcgatagtggccggtttggactaaacgacgaatttcacgggcaacataccgtaattcggtataccgattttcggcaccgatcacttgaagttgcgtcgaatcgatttccggtgctgttgggatctgaccgtggttttcagaagcaacccagtaccgatcaagcgcgagtaacgttggtgaaacccgctggttagtggcaatctgatcagtcatgatgggaatgtgattttgcttggcctgttggtataattgataatacgtacgctcagcttgataaaagaagctgagtttttccggtggttgttggtaattaacatagtcggtaattaaggctacggttaagcttgcttgctgcattaagacggcgactagcgcttgttcttgagccgtgaattgtgcgaaaccttcgatatagaaatgacaatcgtgtaagtcttgtttttttaaataatcagttaaggcatcaattaacgtcgtattttcgatgaattgcttttgcatagcggcttcaaacgccgtggcaataatggttatttcccgcaatttagtagtcagttcgacttcttcgggcgctagctgggccgcaatctcagttagctcatcgggtgtaatacagcccactttaagttccaatagttggctcgttaattgagcaacaaagcctgtttgattgacttccccaccaaataagctgagttcttctgcatgttcttgcaagaggcggtagacaaggatgtttaacccggcggttgaaatccgcggaatctggtagtacggggtatttttcatgaaataccaagctaatcgacttaatgagaagacttggacgcgtgaggttgcgacatactcacttccaggggtttttaggtcatttaaaagtgcgacttcagattcaaatttgatatgattcgggaccaaataaaaaaagcggtccgtgttggtggccttaaggtctgtttgtagttgcttgactagtgtttgatggtggtcataactagctgtaccaataataaattttaagctcatggcgcccacactcctttggcgtcattttaccatagatagacaagtgattgggataaaatccggctagtccgttggtaaaaagcgggtataataggaaacccattaacctgtgcccaatttgatttatgtggcggtcatttttgttttgcagtatagtagtaagggtatcttcaagtcagaaaaagagattaagggtgattgtatgcagactggtgttggccaaagtcatgcgaaaattattttaattggggaacacgctgtcgtttatggacaacctgcgattgccctccccatctttgcggttcaagcgcgggtaacggtaactctcgagccggcactccagacaccgcaaattaagagtacttattacaatggtcctctagaacaggctgttggtcagatgcaaggcattcgccggttaattgaacaactgtggcatgcattagatccgaacttaaccccgtttgaattgacgattgaaagtgacttaccgcccgaacgcgggatgggttcttcagccgcaacggccgtcgccatcattcgagcgttatttgcgacttatcatcaagagctcagtcaacaacggctgctaaagctagccgcgctctccgaaaatttaatccacggtaatccaagcgggattgacgccgcaacaaccggcgcaactacaccattatggtttgtcaaagggcagccgcttcaacccctacccattaatttaaaagggtatctcgtaatcgccgacagcggtcaaaaggggcaaacaggtgccgccgtcaaaagcgttcagaatcaaatgatgtccaatccagaacaaacgcaacccttaattgaccatttgggttatctaacgcaacaagtcgcaagaaatattgcccaaaacgaattaacggtacttggcgcgaacctcaaccgtgctcaacttgatttgcgggcactcggtgtcagcaatgcccgtgttgatcatttgattgatgtggctaatcagaccggtagtttgggcactaagttaacgggtggtggccgtggtggctgcattatcgccctggccgctacgcaaagtgctgcggatgatttggcacaagccttatcagcagctggtgccatcaaaacttggattcaaccactacacgcactttaaaaaagattaggagtattactatgggacaatcaattacagccagagcacatacgaatattgcgctcattaagtattggggaaaacaaaatccggaattgattattccgtataacagtagtctttcaatgacgctagatcatttttatacagatacaacggtccgcttttcaactgatttgactgctgaccaaattagctttaatggtgccattgcggataccaaaactagtacgcagatgagtcagtttctcgatttaattcgaaaacaggcgcatctgcctttatttgctgctgtggaaaccattaatcatgtccccaatgctgctgggttggcctcttctgcttccggttatgcggcattagctgctgcaggtagtcgtgcagctgggcttgaacttaacgatcgggatctttcgagattagcccgccgtggttctggctctgcaacccgctcgatttatggtggttttgtggaatggcaacgtgggaccaatgatttggattcatacgctgttcccgttcaagaaacagttgattgggacatccagatgattgcgattgtcttaaatgatcgtcaaaaagccatcgccagtcgtgctgggatggcgaatacggtggccacgtcgccctactacccagcatgggttgaaaccgctcaagccgcaattccggcaatgaaggccgcaatcgttaagaaagatataaatttggtggggcaattagcagaacaaagtgcgatgcagatgcatgcgacaacccttagtgccgtcccacctttcacctattttgaacctgaaaccctacaagcaattaaagtcgtgcagaccttgcgccaacagggtgtttcttgctattatactatggatgctggtccaaacgtgaaagtgatttgtaccagtcaggaaacacctcagattttagcggcgcttgcgccctattttagtcctgaacaactccttgttgctaaaccaggtcctggtgtgagctatcgataatgcaaatttaagttaaacgtgaaaggttctgatggtttgataacggctaaagcgcccggaaagctgtatattgctggcgaatacgcagtagtagaaacaggttttccggctattatcgtggctttaaatcaatttgtgacagtcacaattgaagagagtcatgaatatgggagtattgtgtctaaacaataccaagaaaattccctttattggcaacgacaaggtgatgaaatggtttttgataaccgcgataatcccttccattatattttgtccgcgattcgcttaacggaacaatacgcacgtcaagcgggtaagacattgcgcgtctaccacctacgggtaaatagtgatttagactctgctgatggtaaaaaatacggtttaggcagttcagccgccgtaaccgttgcaacggtaaaagctctctgcgccttttatgaattatcactatcaaacgaccaattgtataaacttgctgctattgcgcatttagatgtgcagggcaacggttctttaggcgacattgctgctagtgtttttggtggctgggtcgcttatcggtcatttgataaacaatggcttgctgacattcgaccaactgttagtctaacggagctgctcgaaatgccatggcctagtctttcaatcgaattattaacaccgccagcagagttgtcactcttgattggttggacggggtcgcccgcttcaacctcgcacttggtggataaaattgcccttgctaaaacagaacggcaagccgattatcaaaacttcctcgcagctagcaaagcttgcttagaagcgatggtcgaagggtttcgtcgtaatgatttagcccagatccaagctgaattacgccacaatcgtgccattttacaagatctcgctcacttcagtcacgtcgctattgaaacgccaatattacagaaaatgggcgcattagccgaggcaatcggcggtgctgccaaaacatctggtgctggcggtggtgattgtgggattgtcattattgatcgcgctatcgaaacagaggccctctttgaacaatggcgggccaatcaaattgaacgattgaaccttgcagttcacctcgtagattaggagcttacccatggtcagacccaaacaatccattcaatctcatcggaaagatgaacatgtctttttagcggaaaaattccgccatgatgatgccatcaatgactttgatggaattcggtttatccatcaaagcttacccgaaattgcggtatccgacgtggatatcagtaccgattttgccgggactaaccgggccagtcccttttatatcaacggcatgaccggtggtagtcagcagacaaagaaaattaacgcacaattagcgcaagtcgcccaaattaccaacctaccaatggcaactggctcccaatcggtagccattaaagatccgtcactagcggatacatttagcgtgattcgcgaattcaatccccacgggtttgtactcgctaatattggtgctggtaatgatttgaatgtggctaagcaagccgttgcaatgacccaagccaatgccctagaaattcacgtcaacacgccacaagaaattgtcatgcctgaaggtgatcaagatttctactggttagacgagattgctaacattgtcgccaatgttggtgtgcccgttatcgtgaaagaagttggttttgggatgagtgctgatacaatcgcgcaactcaagcaaatcggtgtgcaattcatcgatgtttctggccgtggcgggaccaactttgtcacaatcgaaaacgaacggcgtcatgataaagcctacgattacttagctgattggggccaatcaacggtcgaatcgctctttgaatcacgcgctttccaaaatgacgtcaatatcctcgcttcaggtgggattcggaatcccctagatatcgttaaagcacttcgacttggtgccagtgctgttgggatttccggtcaattcttgcacatggttttaaaagaaggcccgacacaaatggcggaaaacttgctcacttggcaagcgcagattcaagagattatggcaatgcttggcgcacgcgatattcaagcgctccaaaaggcgccaattattctctcgcctgaattacggcattatttgaatgaacggcacataacattttaagcagcaaaagcccggtagaaggatttcttctaccgggctttatttgattgcttaattagcaactacgactttgccaatcatttggttcgtttcgaccagttgatgcgcttgccgtaagttggctgctgaaattgggcttaagcactttgtcagggttgattgcaatttgttttgttccaataaggttgcaatctgtcctaagataatgccttgactcgctaaatccgttgtttgatagtaggtctttgagaaaacccactcccaagcgaactcgacccgttttttagttaatttttgtaaatcgaccgggcgatgattttcagtgattgaagcgatgcggccattgggcttaatcaggcgcgccatactctcccagtgttgatcgatgttattcaactctaatatataatcgaccgtttgatagccgagtgcgtgcacctgttcaatgagtgattgatgatggttaacgacttgatccgcaccatgggccagcgcccacttttgcgtttccggacgggaggcagtcgcaatcacgtgcaatccggccaaatgtgccagttgggtggcgatcgaaccaaccccacctgccccattaatgattaggatggtttgatcatgattagtggttcgatcttcaaaatcaatgtgtaatttctcaaataaagcttcccaagccgtcagcgctgtgagcggcatcgcggcagcttgcgcgtccgttaaattctgcggtgcttttgcgacgattcgttcatccactaattgatattcgctattactacctggtcgtttaaagtccccaacataaaagacacgatcacccggtttaaataacgtgacggcattgccaattcctgtgacaatcccaacagcgtcccagccaagaatacggggcgtttttgattgtcctctacccccttttcgaatgccaacatctacagggttaactgaaacagcggtcacttgtacgcataaatcgtgtggttttggtttgggactggggagattaaaagccattaaactttcttcatttgtaatcggtaaatgtttggtaaaaccaattgcttgcattaaaaatgccttctttcttattcaccattagtctaaaacattaattgccccgtaacaatcgtgtatcgaatgtaactagttacattgttttcactaggcaaatgactgctagcggactataatggcggtatcaaaggaggccatttcatggttcaagaacggcacatttatgattgtcaggcgggctgcccggttgaaagcacgcttcaaattatctcgggtaaatggaaaagtgtgattatttatcaacttttgcaacattcaaatctccattttgatgatttgacgcgcgctttacccgattgttcgcgccgcatgttagccctacagctggaagaattaattgcggatcatgtgattactaaaacggtgattagtctccggccgttaaagactgaataccaactctctgaatttggtcaaacactgagtcccgtgattaacgcaatggcaacttggggaacttattataatcaggttgcacaacaggatgttggatactgtaatttgcagtaatgcctaaatttggatattcggtagattgtaaaattaatccgaacgctgttcggacaaaaaagatcagcttcctttaaaataatgtatacaaaaagccctaccgtattccggtagggcttttcgttgtgtggagttgctattaatattattttttggtacatccttagtgtagcaaaacctgggcagcattccagttacaagttcagcgaattgtccggaaagtgaacaatatcactaaattgtttagtcacttttaacgatttgctcaagctgcttcaaattaaaacataaccgctcatcaatcacctccggttcggtctgcagattattttcaaaccaacaatctaattggcgaatgattgcaccgccgtaaaagtcttccaagtgatttaactgttgtggcgtgtattgtgctttgtaatggcgcaatgccttatgaataatctgtttcataacctgttcaaaaaagcggcggcgttccggataatccgctagatgatataaattcaagcaaaacatgcgataccgtgtaataaattgaacgacttcatgacagccagattcccagtcgccactcactatactctcatcaactttttgaataatctgttgttcaagtgtccaccgaaataagccgcacatgcccgttggaaaatgattataaaaggtcgttcgtgataaattagccgttttcaaaaaagtcgcgaccgtcaatttcgccactctttgatccattaataattcgattaaaatcattgccatatagcgcttagtcgcttgtcgtcgtgtcatttacccacccgttctaattactattgttattttaccaataaacaatcattaacggtaatattattaacaaagattaattttatagcaatgaaaacgttatctaattattatcgattgcacaaaaaaagcggtgcgaatttgatattcgcaccgctttaacacattaattatttttctaaaccttccgcaactgcttctggatagttggctgtgacaattgcagcacaacgcgcacaaagcattgggaacttatcatctgaaccgatatcagtcttaatcatccgacaacgatcacaaacgtccccctcagcatgcgcaacactaaccgcaatgccatcaaattgtgtggcttctgctgggacttctgagttttgatccgcaattgttaattgtgagacaatcaataattgtttaacatcagcatccaatgaagctaataaagcagcattggcttcgtttggataaagtgttacggccgcttctaatgacttaccgatgaccttgtccatccgggctgtttcaagagcttttaagacatcgtcacggatccccatgaaggcattccaagtttcaactaagtcttcttcaccggcaaaatgttcaacttctggcatttcagctaattgaacgaattcttctggttcgtgtaagtagctccagatttcttcagctgtgtgtggcaagattggtgtcaataacttcgtcaaggctactgctactgcatagaaaacagtttgtatgttacgacgaggtgcatcattttgaccatcgatataaacaacgtctttggcgaagtctaagtagaaggctgataattcgttcgtcaagaacatgttaattgtcttataaactgtggcaaagtcgtaagcatcatacgccgctttacagctggcgatgattgcgtttaagcgcaccaacatgaacttatcaactgaacctaattctgcgtaatcaactgtatctttagcaggatcgaaatcagttgtgttcgcaatcatgaaccgcattgtgttccggatcttccggtaagcttcactgacttgttggaagttttccattgtgactttcacgtctgagctagcatcaactgaagcgacccagaggcgcacaatatccgcccccatttgtttgatgatcttttcaggcaagattgtgttcccaagtgatttactcatcttacgaccgttaccatctaagacaaagccttgtgaaataacagctttataagggctgacttcgccaactgcaacactggtaattaaacttgagttaaaccagccacgatattgatctgaaccttctaagattaagtccgctggataagttaagtcatcgcgagccgctaacacagcttgatgtgatgaacctgaatcaaaccagacatccatgatatctttttcttttgtaaattcaccatttggactcccaggatgtgtaaagcctgctggtaataaatctttagcatcccattcaaaccaaacgtttgaaccatgctctgcaaagagttgcgccacacgttcgattgtttctggcatgacgatttctgtgccgtcttcagcatagaagattggtaatggcacaccccatgcccgttgacgagagataacccaatcgccacgatcacgaatcatgttgtaaagacgggtctttccccattctggcatgaattcaactttttcgatttgtgctaagatttgatcgcggaacgcatcgattgaagcaaaccattgggctgttgcccggaagataacgggtttctttgtccgccagtcatgtgggtaactatgcgtgaagaagtcgagtttcaataatgaaccgttcttttcaagcgcttctgtcaccattgggttggctttatcgtaataaacgccttcaaaaccaggggcatcttcagtcataatccctttgctgtcaacgactgaaaggactggtaacttatatttagtgccagcgttataatcatcttcaccgtgacctggtgccgtatgcactaaaccagtcccagtttctaatgtcacgtggttgcctaagatcaccaatgattcacggtcatataatgggtggcgggctgtcattaattccatgtcagcacccttgaaagtcttcaagatttcaactgattcccaaccaagaagatcagtcatcttgttcaaacgttctgctgccacaacgtatttttggccgtcagctaacacttgaacgtaatcgaaagctgggttaaccgcaatccctaagttagcaggaattgtccatggggttgttgtccagatgatgaattttgtatccgcatctaataagtctttcccatccaccacgttaaacgccacgtacattgatggtgacttgatgtctttgtattcaatttcagcttccgctaaagttgattctgatgaaggtgaccagtaaacgggcttcttacctttatagatataaccttttttagccatttcaccgaagacccgaatttcttcagcttcaaaatcagctgttaaagtgatgtatgggttatcccaatcagcagaaatcccaagacgcttgaaatcttcgcgttgcttgttgacttgttccatggcatagtcgtaacaaagtttacgataatcaacgaggctcatttctttccgcttgataccctttttagccaaggcttgttcgattggcaaaccatgtgtatcccatccaggaacaaaaggtgcgcggaacccgttcattgatttgtaacgaacgataatatctttacttgttttatttaaggcgtgacccatgtggatgttgccgttcgcaaatggcgggccatcatgaagaacgaatgaaggtttaccttcatttaatttttgccgttgttgatagaggttgttatcggcccaacctttttgccaatcgatttcacgattcggtaaacctgctcgcattgggaaagctgtcttgcccaggtttaatgtttctttgatacgcatcaaatcactcctttatttttaaaaacaaaaaaagatcccgccctgaataggacgaaatcttcgtggtaccacctaaatttgaaggtcaatgaccttcctcaacatgcaataacgcgcattaagcgtcccaaattactcaattcatctggaatgaaataaggtgatacaccgctaaacagagcattaccaaccttccaccgtcgttggctcgcttaaatgatgttttgcttgctagtccttatttaaatctgttgcttggttttcaattgggttgtaagaatccgtaacagcttcaaccacttcatctgaatcggtgtcttcgactacatcggagagcacttcatcattgtcatcttcttcgactggtgtttcttcaccagggaaaataatggtttgcgttgttgtcacatcatcttcagcaatttgaccccaaggtttaacttctgcatccgagtttacttgatttgacccatggttgtcaaggtctgtcatatcaatttcagctgaaagagcttgatggtccgctaaatcatctttagctaataaatctgtccattcaggactcttaaccacttctaattgtgattcaagcataacttgtaatctttgacggaaaatccgtgtttgtttcttcaagtcatcggtttcgattgcaatttgttttgcacgttcagttgcatcgtcaatgatgtggtttgatttttcagttgcatcatccaacattgattttgcattcttttctgattcagtttgaatcatttcagcttcttttttagcgttatctttaacacggtcagccgcttcttgtgcaacaatgattgattggttcaacgcatctttcaattcattaaaatacgttactttttcatcgcttgattttaattccgcttttaaactttcattttctgttaaaactgattcgtagtctttaatcacttgatctaagaaatcattgacttgatccggattgtaaccccgcatttttgtgttaaattctttgttatgaatatctaaaggtgttaaaaccattttgaaattcctccatctttttcagcaattattttcttaaaatccccagtgtcactcgatatttttctttacgagtctgaccatcaatcgattggagttgaatccggccaaaaccacgaacagagacgatatctaatagtgctaattcaaaatctggtttatcaaatgcttgccaattcagtttaactttgttggcttgaattaattctttagcgcgttgtcgcgacagattgtaaacagttgaaatgatcgtatccaagcgaaacgagctgacagtcgtttgttcgaattgccaagcgtccttaggcgtcaacaactgtgtatagtcttgttcttgcaaatgaactgatacgcgaccaatcttagtgatttgctcttcgacatagcctgccatcttcttcgtcacaaagaattgccagcgttcttcatcggtcataatatccccaaaaacatcacggtcaatgccagcattcacaagcgtgccaagcaccttcccatgtgataggtttgcaaatttaatcgggtaccgaatctcaaataattgaatctcaaaatccgcatccgttggttcaaagtaatctggagcaatcattgcccgtttccgttcagcagcgttatatccgccattaaagtgataacggacgtcccctttttcaccgaccaaggtttgtaaaataaacgcttgacgcggatctaaaaacgccgttaagattggtcgatattcaacttgtgcttgctcaatccaatccaaaacctgcgcaacaaatggcgcctcgctttttctaaaatgttgatagacatctgcttgattgaccattgattacatccccactaataattgtgcgagtaagccgatcccacgttctactaaatataaaacgaaaaacgcagcaatggctgaaatcccaataccaccgattgcaggaatgaagcggtcaaagatttctaagaaaggttcaactaacttagcaacaaagcgccctaatttactgcccatcgcctctggaatccacgttaataaacaatagattacgacgatgccactataaatccgtaccacatacatgagcatcaagagcacataaaataaaaatagttgcacctagttcacctcaatatcaaaatcattttgatcgacaatatctgaaagattaccatcgatttcatagttcggtggcgtacataagaaaatctgatcaccaacccgttgaatttcaccgttgatggcaaaaactgcccctgttaggaaatcaacaattcgagtggcttgtgtcgcttcaattcgtgtgaagttaacaatcactgctttattttcaagtaaacttttgccgactttttttgcgtcggaataaatccgtggttcacataagacaattttattcattttagtagctcccgcagcttgcatcgagacgacgttattcgggcgaacacttggttcaccttcattagtgacagccgcagtttcttgcgtattagcatattcatcttcatctgacatgccgaaaaaattgctaagactaaacttaccagccatgagtcatcctccttagttattgcgacggcgcttgaaaaatggcggcacatcgtccccattttggttatcttgcttattatcatccgcttgggctgtccgtttgaagatatcgaaatctttcttttcaatttcatcaaatttttcagttgcttgcgcttgctcgcgggcacttggttcgcgacgcatatcccaatctacaaatggatcattattttgttctgatggtgttgaaggcgctgttgtctttggtgctgaattgtttgttgctggacgacgtttgttgttatcttcatcaatcccagttgcaataaccgttacaacaacttcatcaccaagattttcgttgattgaagtcccgaaaatcaagttaacatcgttagttgcagcttgttgcacgataccagcagcatcttgcgcttcaaacaatgacaagtctggtccacccgtgatgtttaagaggacttgttctgcaccatcgattgaaacttccaataatggtgatgaaatagccttcttcgttgcttcagctgtccggttttcacccgttgctgaaccaatccccatcaaggcagagccttggttagccataactgttttaacatcagcaaaatccaagttgacaaaccctggtgatgtaattaagtcagaaatcccttgaaccccttgacgtaaaacattatcggcttctttgaaggcttccatcattggtgtcttcttgtcaacaatttcgagtaaccggttattagcaatgatgaccattgtatcaacatgttgctttaattcagcaatccctgaagcggcgtttttaccacgtttagggccttcaaatgtaaatggacgagtaacaacccccaccgttagtgcgccaagatctttagcaattttggcaacaacaggggcagcgccagttccggtaccgccacccatgccggctgtgacaaagatcatgtcagcgccttttaaggcttcgttgaggacttcttcactctcttcagcagctttttggccgatttcagcagttgcgccggcaccgaggccgcgagtcaacttaggtcctaattggatctttgtttcagcttttgaatcttcaagtgcttgaacgtcagtgttagccgcaataaaatgaacgcctttaacgccttcgttgatcattctgttgacagcgttaccaccagcaccaccgacgccgattactttgatgattgcgccgctattttcttgtgctgcatctaatgaatattccatctgtttttcctcctgttacgactagcccttattcaaaaaagttactaaagaaatttttcaggccttcgaatgcattttttgattgatttttaggtttggttttcttacttggtacttctttggttgttgcttgagatttcattgttgatttcgtcactgtttggtctaattcagtctgtgctacattcccaagtgcgccttggaccaaccaatcaacttccgacaagttagctatgtagttaattaaactcaacccttgggcaaatgatggatgccgcaagcccatttgatctggaatgtataacttcactgggcaattaaagatttccttagccaagtcgacaatcccaggtaaagctgtcacgccaccggtcataatcaccccaccaggcatatcaaaagcgtgtactttatccaattcagctttcaaacgatcaaaaatctgcatcgtccgtgcttcaataatctcagctaattttttctctgtcacttgcactggtaaggcttgaccaacaacttcaattggaatttgttcttcttctgaagcagccaatgaatcagcattaccataatctcgtttagctttttcagcattttcaattgacgtgttcaagaccacggaaatatccttggtcatatggtcgccaccttcttgatcaatcgccgtaaattttaattgatgatcatgaatcacagcagctgtactttgaccaccgccaaggtcgacaacgattgccccaaaatcttgttccccgtctgataaggctagcttgccaagtgctaatgggttcactacgagttgtgatagtgttaaacccgctttttcaatacatttctttaaattatgaatcattgtcttgggtgcggtgaacaaaattccgttcatctcaagccgaacccccatcattccgcgtggatctttaatcccatcaaacccatcaaccgtaaacgattgcggtaagatattgaggatttcacgttcaggtggtaaattccgaaccaatgcggcactggcaacgtcttgcacatcttgaccagtaatttccttagattgatcagagaccgcaatcatcccttggcattcttcgatttgtagttggttggctggaattccagcaacaacccgattaatttcaatatttgctttttgttctgcttgttgtacggcttgttggatagcggtaaccgcttgatcaatgtccacaattgtcccgcgacttaatccgtttgatctagctgatccgacgccaatcacattaagttgtttattaattgattctgcaacaattaccttaattgaagtagttccgacatcaagactgacatatatttttgaattctccattaagtgtgtggaacctccttgcattcaattagaataaaatgattcctatgctaaatagtaccacatttcgactagatttagaaagccaatccaatctttttaaacagtgttaactaattttttgttgaatcagcctcagaattatcaaataatttggcgtaagcgccaacttctaagtcaattcgtcccttaccgtccatttgtttcgccagtgtgggataatatttaattttcttggcaagtgtccgcaaatccccaacaacctcattaccatcattcatatataagtgaacttgataaggattattgttcttaactgttaaacgaatttccgacacagcactttgaatgctgtttggaaaagcttgatatagttttaacccttgctttaagaaggcgtcatttttaaattgactatagacagggctattgccgagagactgcgtcattttcgtctttaaaatcgtgccattttctaagattggataatattgtttatgccgcactagatagcccaccgtaggatattccttaatcgccaatgtcagttgattaaactgatcaactttgacatttacgcttttcaccttaggtagtttctggtgaatccgcttctcaatcgctttttcctgccagatttgtgtcaggacgttattgccaatccgtacgccactcgcattaatcacctgttgatcaggcactgatttagtcccgttgaccgtcatttgttgaacgtcgctaatcggcaacataaaatagattgccacacaagcgcccaatgtgaaagtgctcaataacgctgtcaaccgccactttgtctttgccgttcgttgcgcttttagatgtggtagttgaccactaattgttggtcgcccaggcgttaaccgttgccgacgttgtttcttccaacgctttagttgataagcacgccaaacgtttagtaattggagcggatcgagcgacccatttttagttgtttttttcttcaagtcatccgcccccttcttaacttagatgatagtattaatcacttcaataatgcgatctgaagcgtctggaatccccattttcttagctgctttagccatggcttgttgactatcaggggttgccaaaagcgtatctaatgactgaactaatttgtcacccgttaattgtgcttctggaattaaaatcgctgcgtcttctttaaccaaactctcggcattttttgtttgatgatcatttgttacataggggcttggaatcaaaattgacggaatcccaagtgctgtgatttccgccaaactcgtcgcaccagcacgaccaacaatggcctttaaatctggtaaaatttcaggcatgtcgttgatatatggtacaacagccaaattatcgttgagcgtcatcgtctttaattgtgcttgaacatcatcaaaatgaacccgtccagaaacgaatagcacctgatactctcttgtattaagtgctggtactgcatcgataaaagcttggttaatacttggtgcaccacggctcccaccaaacacaagcactgtcggactgtcagtcttaagcccgaattcacttaaacgttcgtttggtaacattccagcaacttgttgggcccgcggattacctgttaatacaattttgtgcattgggaattggtcgctgactgattcaaaggaaatggcaactttatcgacaaagcgcgccaaaaagcggttggtaaccccggctgctgagttttgttcatgaatcaacgttggcacttttaagcgacttgctgcatatagcaatgccccagaaacatagccacccgttccaatcacaatatcaggtttgaatgttttaatcatttcttttgcctctttaacactgcgcaagaaaagttgaattgttttaatattcgttttaatgcccttcatattcatcgaacgtttaaatccttggatttctaacgtcttaaaatcgatgtcttgatctggcacaattttactttccaaaccgcgtttagtcccaacatataaaacggcatccaacaagtcgcgttgttgcattctttcaattagggctaacgctggatagatgtggccaccagttccgccaccagatatcattactctcattttagaatctccaatttaatctgtaatttgttcgactgccttaataaagacgtctccacgttcttcaaacgtcttgaactgatcccagctcgcacatgcaggcgacaataaaaccacgtcgccggcttcactagcagcataagcttcaggcactgcttttgttaaattatcaactattttgatgacgggaatacctgcttcacgtgctgtctgtgccaacaattgtttggtttcaccatataagatggttgcttttacgtgttcttttagtagtggtaataatggttcgaaagtaaagccccggtcaagaccacccgctaataaaacaattggttgtttaaaactcttcaacgcgacttcggtagcttccatattggttgctttagagtcgttatagaagcggcgaccttcatagctcgtcacaaactgcatccggtgtttaacaccggtaaaggtcgttaaaacatcaatgatcgcatcgtttgattggtccatcaacttagccgccgcaattgcggccaaagcattttcaatattatggtcaccagggacgttaatatcagtcactggcattatcacttcacccttaaaacaaagttggccatctttgacataggcgccagcttcagagttgcctagccgtgaaaatggcacaacttgcgccttagtttggcgactcaattcacgtagttcaggtaagtcccagttgacaacaaaaaagtcgtcagccgtttggttttgaataagtcgcattttcgcagccacgtaattcgcacgcgagccatgatagtccaaatgtgcttcataaatattcgttaaaactgcaatcttaggtttaacggttgttgtaccgagtagttggaaacttgataattctgtgaccatcacatcggcagccgtcactttttgggcgaccgcacttagtggaatgccgatattgcccgcagcgtatgcgtgcccctgggtgcgattttcatctaacatcaacgtaattaacgttgtggtagtcgtcttcccgtttgaaccagtcacactgacccattgggcttcagacacttcgtacgcaagttctggttccgttaaaactggaatcttacgcgcaatcgcttctgccaccattgggttatcgtaacgaatgcccggatttttgaagaggtatgcaaagttgcgctcaaataacgccaatggatgcgatccagtaatgacggttgcccctaattcacgcaattgtgcaacttgaggattgtcttcttgttcctttccgtcattgacggtcacaatcgcccctaattttaataacaatttagcagcattaaagccgctcttccctaatcccaaaactaaaactgcctgatcttgatacgtcgtgctggccttcattaaattcgccctcttctaaaaaattaacagataaattgctgaacagatgatactaaataaccaaaagctgatatcaatccgccattcactccaccctgacatttcgaagtgatgatgaatgggactcattttaaaaatccgcttatggaataacttaaatgaaccgacttgtaacatcacacttgctgtttcaatgacgtatactaacccgaccaatagcagtgagaactctcgatgtaataaaattgacatggctgctagtgcgccaccaagtgctagtgaaccaacatcacccatgaaaatttgcgctggttttttattgtagattaaaaagccaagcaatccgccaataatgctgaggccgaaaatggcgacatcaatttggttttgacgaaaggcgataattgtataagttgcaaatgagatggttgccaagccagcaactaacccatcaatgccatccgttaagttcaccgcgtttgagaaaccgactaaccacactaagacgaatacacaaaagaaccagttacttgaaatagtgccaattactgggatttcaagtgcagtactgaagccttcatggaaataaacagcgatgaagacaatcccaccaataatttgccctaacaatttttgccaagcgcgtaagcctaagttctgtttacggaaaactttaataaaatcatctgaaaaaccgagaataccgtataacaccagaataaacatggcaattaatagactattcgttaactgttttaagaataatcctacccaaatacttgaaacaacagcggcaataatgaataagagcccgcccattgttggtgtcccatttttcttagcgtgccatttggggccttcttcacggattgtctgcccctcttttttaaagcgtaaatacccgataaaaagcggcataaaaatcaccgtaattacaaacccactcattaagggcactaaaaattgtcctgctgccatttcataaactcctttaatccaactatcttattttaattgtacttttatttttttaaccccatctagcaacccattgaccgctaggctttgatgataagcatatccgctacctttgatgtcaatctcaacacctgttaattgcgcgagctttaagaggtcatttttcgaccaacccgtgacatctggcatcgtcattgccccattggtcattaaaatgactcgctgtttaggtaaaatcacactattggcctttggtaattgctggacgactaagttcccactaccaacagaagcggtttgtaggcctaaatccgttaatttcttttgtgcttcatccgttgattgaccaatcacagacggaactgttacttgttgttgtgtgtctttttcagcctttttggtatactccagtgcccgtttcatcattggattgaagacctgtgccaaaatactttcagcactatctgtcatattctgtggctgtttcattgtgacatataaaatatacttaggatcatcagctggtgcaatccctgatacagagaagatataattgcttgcgccggttaaatagccaccgtctagaccagtaatttgtgcggtcccggttttaacggctactttataatctggaatttggtaaacctgacccgtcccataatcttgataaacaacatcttccatattttgtaagacagatttggccgtgctagccttaattggtttaccagctttgattggttttacttgatgatcctgattaatcccagataaaatctgcggtctaatcattgtgccatcgttcgcaatcgcacttgtcatctgaagcatctgcattacattaacgttaatcccttgaccaaatgaagttgtggcctgatctagtggccgaacatattgcaatgtcccctctgtttcgccgggtaattgaataccagttggttttaagaaaccaaacttctgaatgtagtctttccaaaccttaggacccatggcttgttcaagcttgaccatcccaacgttacttgatcgtgcaaaggcttgactcagcggaatcatcccccagccactcgtttgccaatcgctaattttcttatcgccaactccaatcgaaccggattgataatactgattaggattgtaattaccagagtcgatggcagctgccaaggttgcaattttcaaaacagagcctggttcatagccatcttcaactaatgtatctcgccaaatcttgccaattccctttttagtgctggcattaaaggttggtcgttgtgaagccgccaaaatttcacccgttttagcattcatcaagacggcattcatactcttaggcttatattttttattgacgctcgttaataaagtttccatgtatgattgtaaccgagaatctaaggtcaagtaaatatcttggccgtttttagcggcttttactttgtttttcttttgattgatcgtgtatccataggaatcacgggcaaaattcttgtaaccatcttggcctgctaattgtttgttgaagtatttttcaatccccattacaccaacgaggctttgatcagcgccgtcttcgtcctttggtgattgagcgataccaatgacgtgagatgcgaatgttccattagggtacagccgcgtaggggactcattgaagtaaataccggttaaatgttctttttcaatcttccgtttgatgctcagtgaaaggttttggccggcacttccgaattcaacttgataaactgaacggttagctggcgttaattgtttatagattttttcttcactcaatggtagatagcgactcaaaactttcgctgtttttttcttatcagttacatataacggcttcttattaggaccaacgtaatcgtgacttaataccgcatacactgaataggcgttaatatcttgtgccaaaacgttccctaaagaatcataaattgtaccgcgttgtgcgcgaatcacggaatcagctttgtattttttctgtgatcgtttcgttaaatccacccctgcaatatgcccagtagcagcaatgtaagcaaaacgaccggcgaaaactagaaaaatcgccgcgataattagcaataaaagcctgccaaaaacgcgtcgattccgccgtggactcttacgtgtcttaactgatttcatttagacacgttccgaatattattttcatttagtttaagatcatgtttctgggcaaaagcattcagacggtcagagcttgttaattcaccgatctcctgttttaaatcattattgttagcgctgacttgggccatcttttgagtcgtactttctaatcctcgttgtgcattaacaactgcaattttggtggttaacaaactaaccaacatcgcgaaaaagataattccaataactgacgtcgctaatttttcaacagctgaaaaagccacttttttagactggcttgcaactgcttgtttatgtgcagtaggctgcgtttttagcggtgctactggcgtttctaattggcgtgccgtgttagttgccatcatcatcaatccttctagtcaatttctttttgtttttctgcgacacgtagcttagcgctatgtgcacgatggttttcttctaattcatcatctgttggtagaatcggcttgcggttcactaattttagaaccgttttttgttcttctggtaaaattggtaaccctttcggtaaatctgggagcgttgcttgttccttaaacatcgtcttcaccaaacgatcttctaatgattggaacgtaatgacactgatccgcccgccgacattgaccaatggaatagcttgttcgagtgaatcttcaattgcccctaattcatcattgaccgcaatccgaatcgcttgaaaaatccgcttcgctggatgtccaccctttcgtcttgctggtgcaggaattgcttctttaatcaaatcagctaattcgattgtcgtttcaatcggcgcaactgctctttgttgttcaatcttccgcgcaacttgttttgagaacttttcttcgccgtagcggaaaaagatcttaattagttgttgataggtccactcattaacgacattgtaggcactgagttccgccccttggtccattcgcatatcaagtggggcttctttcttataactaaacccgcgttgggcatcatcaaattgtggtgatgatacgcctaaatcgtataaaataccatcaatcttagtcacaccgtgttctgctaacgctgcttttaaatagcggaagttactcttaataaaagtcacttggcccgcttcagcatatttggctaatcgttgtttactacttgctaaggcatgatcgtcttggtcaaacgaataaagatgaccggtcgtcagctgagataacaaatattcactatggccgccgccccctaatgttgcgtctacatacacgccatcgggttgcacattcaaggcatcaaccgtttctttcaataaaacactttgatgtttaaatgtttctgtcatctatttaccatccttctaaaaatcaaaatctaacatattttctgcaatatcatcaaaattctcttcagcttcttcgctaaagctcgcccatttttcctggctccaaatttcaatgcggtttgagaccccgattaatacacattctttttcaagaccagcatgtttagcaagtgtgtctgggatattcacccgaccttgcttatcaggggaacattcgaccgccgctgagtagaaaaagcggacgaacgcgcgggtatcttttttagcgaggggcagtttttttaacttctcttccaactgttcccattcactaagggggtaaccaaaaatacaattgtccatgccacgggtgagtacaaattccgcacctaatgattcacgaaatttagccggcatgattaaccgacctttcgtatcaatcgtgtgatgaaattcgcccatgaacataaccattcacccctttgcccaccttaactgattttagtctaccacaatcccccactttctaccacattttgccaaaaaaaaccaaaatcttatcattttggaaccaattgtacacgatatttatattactagcctttttgaccaaaaaaaacagccatttcgttaaccgaaatggccgtttcacttgttaattaagtaagcttattttgggctgtcgcaccacttctaagcaacgccgcaaaaaattgctcactttaatctaatttttagaagtttaaaatgccagttgcagcgagtgaaccaaaaatgactgagcccactgtggcgattaacattacccaaacgaaaattttagtaatgcgactaaacgtgcttgtttgtttcttcaattattccaccacctagacttttttcttatcagcagtttacaccgaatcacttgaaagtgcaactcagtcctttttatcttttccaaaagacggtacaatgagactattaactttcgaggtgatttaaatgccatttagcacgacacttttctttgcaggcttaccgcccgtctgtgtcgcactcggctactgtatcgaccggttgactcagcgtctatttaaacatcgttttcattatattaattggctaccaattccattgctagtaagtgctatctttctgagtatgccaattttcagtaaagctggctggttcttttgcttagctatctgtctgtggggaatcatctggagcttaacgcgcttttactacgaccgtgcgctgtacctacgtaagtttctacggagttggtggcgctttgtcctcgtgatggccacagcatggtacctatcctttctaatcatcacactcctttaaaccaaaaaaaacggtgtcgactctttcaatttgtcgacaccgctttttttagtttaaaaaatatttccctaacgcgcttaattgcgtaattgtgattgtcggttgcaccgtgattggtaatcgatcaacatcgaaataggccgtcgccacatgggcgttaatccctgcttcaatatctaatgcacgatcaccaatcatcacggttttagttttatccagctgataacgatcacataaatcgttcaaactatctggcgccggtttcctggcaaatccgctctgactcgtaacaatttcagtaaaataatccgctagtccatgcgctgccaaaaatttttctgcagcatcatcacgatgggtcaataagaaattctgaccatgtgcactaatctgtttcaaaatcgccgctgcccccggataaggttgtggcgtctgttgtaattggtgttctaattcatgatattctcgatccaattgttcaaatgaaacattagtttgctgagcaagcatctgcagttcccgtttaattgaagtctgcttaatcgcttggtataagtgcgattgatcgactgcgacttgatgatcacggtaaacctgactgagcgccgtcatcataacaggataagtatcatacaatgtaccatcgaaatcccaaatcgcattttgataactcattaattatccattctcctttgtatcaaataggatagtgactggaccgtcattgaccaaagccacctgcatatcggctccaaattctccagttgcgacgcgaatcccagtcgctgctaatttttgattaaactgttcgtataagcgtttagcatagtccggtttcccagccgcagtaaagcttgggcgattgcccttcttagtgctagcaaaaagggtgaattgtgacaccgataaaatggcaccgtcaacctgggccaacgccaaattcatcttgccatctgggtcttcaaaaacgcgcaattgactaattttcttaaccaagtaatctaaatcagcttcagtatcatcatcacaaataccgaccaataacaaaaagccttggttaatcttaccaacaatcgtctgatcaatcgtgacacttgcttggctcactcgctgtaatactactcgcatattaagtcgctcctatccttgaacccgtttgacttcgtaaacatctgggatgttcttcacggcttccataatcgtttctaaatgatctgtattgcgaatgccgactgtcacatgaatatccgccatcttatcgtgatcaatccgccccatcacgttatttagctgtttcgtatgtgcatttaaggactgtaagacatcgttcaatagtccaccacggttatagccgtagatttccaaattcgcatcatagagttgatcattcttagcgttggtattttcccaactgacttcagtcaatcgactgttcatatctgcccgatcaacgatattcggacaatcgcgccgatgaacagaaaccccacgtccctttgttacatagccaacgatatcatcaccagggactggattacagcatttactcaagtgcactaagacattgtcgacaccttcaataacaacaccgtcttcatgtttgattgtgatatggctaccatttgctttaggccctggttgttgtgaatccttcgctgatagaatctcagcttctaatgctttttgttcactttcttcttttgcccgtcgttctttaatcgttaagcgattgacgactgactgtggtgagatttcaccgaacccaattgctgcaaacagttcttcttcggcattaaaattaaaatgcggtaggatgacagctatctcggctttagtgaggtgttcttttggtgtataaccatcttctaccaacagatgttcaacagccgtccgtcctttttcgacgttttcatcccgatcttcttttttaaagtagcgcttaaccttattccgagcacgcgcagtgaaggcgagcttaatccaatcacgacttggtgtcgcacttgttgacgtcaacatctcgacaatatcaccattacgtaattgatagttcaacggtacaattttgccgttaatcttagccccaacagcgtggttcccgacctcagtatgcactaaataagcaaaatccagtggcactgaaccctttggtagttcataaacatcgcctttgggtgtgaaaacataaacgcgatcgctaaagatatcgcctttgacactttccataaattctgcagcatcatcggaagcatcttgaatttcaagaatttcacggaataaatcgagtttacgccctgattcatccaccttaatctgttccttaacgccttctttatacgcccaatgtgcagcgaccccatattcagcaacatcgtgcatttcttgcgtccgaatttgcacttcaagcggtttgcctttgggaccaatcacagttgtatggatcgattgatacatgttggcctttggcattgcaatgtagtctttaaaccgaccgggcatcggtttccacttagtatggattgctcctaaaacagcatagcagtccttgattgagtcaacaacaacccgaattgcgagtaaatcatacaattcttcaaattgtttatgctggtcgcgcatcttacgataaatcgagtaaagatgctttggtcgtccataaatgtcgtaattcatatctaaatcagcaattgagtctttaatgtcttcaattgcttcttgaatataagattcgcgttgtgtccgcttagaattcatcaggtgcacaatccgatagtactgttgtgggttcaaataacggagcgagatatcttccaattcccacttaatcttactaatccctaaccggtcagccaatggtgcatagatttctaatgtttcgttagcaattcggcgttgtttttcgggtttcaaatgtttcaacgtccgcatattatgcaagcgatcggcgagtttgaccataatcacccgcaagtctttagccattgctaataacatcttccggtgattttcagccagttgttcttggtgtgatttatatttaatttttcctaatttcgtgacaccatcaacgattaccgcaacatctttgccaaacatctcttcaacatcacctaacgtgatattcgtatcttcgacaacatcgtgtaagtaaccagaagcaaccgttgcgggatccatcttcaattcagcaagaatccctgcaacttgaattggatgaataatatacggttcacctgattggcgaacttgttctttatgcacataagctgcaaaatcatacgctttttggacaaaagcaagatgctcagtattcatgtatttctgacataactgtagcacttcctgctgtgaaattactttttcttccggcatcctgcctcactccaattcctcttactcgattaaaaatgtactgaatacaacaaaactgactcaactaattaactgtcgagtcagtttgcttaacggcgttcatacgcagtactaattcctaagtaacttaataaacaataaataggaacgaaccaatagttataatctgcgtagcgcacaaccaccatcaatccaaataaaatcggcaggtacaaaatgtgataccaagctgcatgggtcttttgaacacgatacccaatcataaaggctgcgcaaccattgacagccatgaatagcagtccaatccgccacgttttatcgatgtgcaagacaccaaacactagcggtaaaacgaccgccaagagaatggccactaataaatagcgtacccaatccatttttaaataacgattattcataaatttagtcatgttgtgcccctctgtaaaaagattatatctatcatactataaagtagccaattctgtcacatacgaaatcgcacttaacagatataacggcgcggtctcggcccgtaaaatccgtggtcctaaaccagccatcttaaagccagccgccgcaagcatctcaatttccttgggcgcaacgccgccttctggaccaaaaacacaaagtaatcgatccccagattgggctgtttgtaagctctgaactaattgggaatgctcaccgtctttagctgactcttcgtaagccactaatttaatcgtcgctgattcttgtgcgaccgccgttaaactgttgcgccattcaatagttggtacatgcgtccggtgagcttgttcggctgcttcttgcgcaattttttgaagccgcgcaactttcttagcttgttttttatcatcccagcgtgcgactgagaattggctattacagaaaataaaccggtgtgcacccaactgcgtgcctttttgaacaatccagtctgttttgtcaccctttgacaagccgcatacaatcgtcgtctcaatcggtaattcaactgattttgtaattggcgattgcaccgtaacggtgactgttttgtcagttgcatccagttcagttaattcaccgatgaatgcttgttcatccggcgttaccaattcaacacgatgaccaggctgcatccgcatcacttttagcatatgatgtgcagtttcacccgttaaggtcacttgttgttctacttgaattgcttcatcaataaaataacgttgcatgccatactcctcttaatcgtcgtccgtcttttggcgtgtaatcaatgccacccagtcacccatatgaagggcttcttgaacaacaaaatcattcgccgataacgtttcacggacaagtgcttctttatctgcaataatgccggccagtaataggtgtccattgtcattcaataaagccttggcttggggaatcaagggcacgataatctctgctaaaatattggccacaatcacatccgctttcgttgtaatcccgttcaacaaatcgttgggatgggcatcaatgccagcggtcactgggttgagggcaaaattttccttagcggcatcaaccgcaacttgatccacatcataggcgcgaatatcattgactcctaaatgcgcagccgcaatactcaaaaccccagaaccagtcccgacgtcaattaaagattcaccgccgcgtaaaaccatttctaacatttgtacggatagatgggttgttggatgcgttcctgttccaaaagccatccccggatccatccgaatcagtgcttcgcgttcatcagtcggttgatagtcggtccaacttggcacaaccgttaaaaagcgagttagccgcgttggttgataatatttcttccaagctgtcgcccaatcatcatcggcgacttgtgccaatgtcactttaccagaaccaatcgctaacccaaagtcagtcaattgggcaacgcgttgttcaatcaacggtaatttttccggcacaaaaactgtttctgggaaaaaggcactcactgcagcacccgtttcaaggtggggaatactgtctagatcaataatttgatctggctttgcctttaaatgttcataatcggctgcgtcttcgatttggattccttccgcaccattttccgttaaaatattggcgattgcttccactgcttcattaacagtagcgaccgttacttttgtccattccatgtagcatgtctccttcttaatgcgggttgcttagtatttagggtaagcgtagtattttttcgctaattgatcatctgcttgagcgacagttgcttggaaaacagtgtcatcccagtttaagataaaggtttcttcgtctgattcatcattcacaaaagcggctaattgatcttcgccttcatctaataagtcttgtaaatagttgaaaaagccccgaccgacttgtgcgtttaaccccttgcgaccagcaaatggaatcactgctaaataattgtctgcatattcaaagccgtccatcttactttcatcgaagaataaaatcgcatcttcataactgatttcatccgattcgttcaattcaccattttgatcttcaacggcaattgcttgttccttagtcacgtttaatgtgaattccaattcaatcgcccgagcttgtttgtcccagttgatattcatatccccactaaattgtaaatcatctaattctgcatcgaaaaatactaacatatccatttcagccattatattcaccatatccttttaattagtcgttatttaagtcaattttaaagttgaacgtattaacatcatacctgattatgacttgaatctaaagcaatcattcaaaaaagcccagaacaaaatgtcccagactttcaatcgtaattctacttaatgtgctgcttggttctgaccccaataaataacgtccatactctgatcgtcataacgttggaactcaattccgagtgctgcatcagattctgccatcacacgaccatatagccgcatatcagcttctggcgtgttgccatctgggcgaatggcatgcatcaacataaacttagccatttctgattgtagatgggcttcaatcggggccaacggatcaaaaaccatcgtgacaaaccgaatatcactactatcgccatcaccaattaattcaacaatcggaaacccaccaaaattttgttgttgttttaaataagccaataactggtcaatctgttcttttgtgaaggctgatttataaaagaggaaatgccaagtttgtcgtttcatcgtgtcacccacccgttatttattacatatagtatgccatactgtcaccaacaacgcgaacttagtctttttttggtaattgattcgattttggttggtgatatgcctttttcaagccagcaaatgtcgcttgaatcttttggtaatgcatttcatcgttacgcgcatgcttcactaactgggtaaaatcgtgggactgtaagtccttttctgtttgttttttaaaccacaacatatcatcactccttatgtaattttattatacaacgaaacgttatcattgcagtcttaaatttacttttaaaccaaattgccgtaaactaacactattcattaaaggagtctattatgggaaagaagaaaaagcaaaacgcattatccaaaacattagttgaaaaaattctagataaacaaaaagtggcctacacccaacttgaattcccaacagaggaagtccacaacattgcccaaatgaaggccgatcatctcgatatcgatgaacatcttatttataaaacattggtgctctctggtaagagtaccggcccaatcgtcggtgtcgtcccgattgattgtcatttagacgaaaaaaaattaagccaaatttctgacaacaaaaaaattgcgatggtcccattaagggagctcatggccactactggctacgaacatggcgctaacacgcccgttggaatctgggaacaatcccactatccgatttacattgaccaacaggctgaaaaggaaccattcatctatgtctcatccggtaaaattggccgctcaattcagattaatccgcaagacttacagcgggtcactgaagccacctttgctgacatcagtgaagcctaaaaatatgataagaggggctagaacaattcacttgttctagcccctcttatttttgagtttaatctaagtattgggccaaattagcaccagaaatgatgacttgttccttcagcaaatttggttctttaataatattatgaaccaccgtttcgggtaaaacatcattttgtgcgagcatttgcagagcatcatcttgcatcacgacttttttaaccatattatgtattttaatcgttgcaacatatttttgcgattcccgttcttcaaccacttcgtagttgccgtaataatgtttatctgtcattaactcatccccttaaggttaataatatcatatttcaacaaataaaactaagtaacttatcctataataaggggaaactgttaaaaaataccaaaaaaaagcaaaacaataactgttttgctttttccattatagtaaggagagtacaggattatattaggactatattttaccgtagtaccagtatttctgtactcttctgggacaatattgggacaatagaatttaaaaatttaaatataatgtatttgctttaccagtctttttatcatgaataaaggccgtgtgtttaacagaaccgtctggattatagacatctgatttttttaaggtcatgacatcactcacccgcagtagggtggctttaccaacttgaaagatggtgtagttacgccgacccgcccgaaaactatctagtagagaaaaaactcccccttaagtttgaactaattaatttagaaatattatgtccatttacttcttaacagattttaaaattctatatattaaatacattagataattaaattcttcatttctccaaaacaaacctgtaaacagaatacataatattaaaatcgcaattatggagcgtacaattattcctgttagctcaccaatcagtacaaatgaagtgattgtgtaaaccatccctataattaaaactcctaaaattataaataaatattgcttgattaaaaatgattttacactctttttaaatccgtaatggaatatttgcctattttcccaccaactacttattaaaatagtcgttaatagagtacctgttaggacaccatttattccccaacctggatgctcctatcctagtatttggtacataaatttctgaacagttgtgccataattaataaaacaagataggagcattccaatgaaacgatatcaagatgattttaaagccagcattgtgaagatgcatcgtgaagagaaaagatctattcgctcgctttccgaggaatacggtgtttctccagccgcaattcataactgggttaaaggcgctaaatcagttgagctagaagacggtactgaagtaacgtccaaagaattaaaacaacttcaaaaggaaaatcagcgattaaaggaggaacttgaaattttaaaagctgcggcggtgttactgggaaagcattaggacgaattaattgccttgtcttcatagaagatcagttattgcgacaccgcttatcaattattctttcggcactgaaattaccgcgcagcacctattaccattggaaaagatatcaacctagtcaacacgaacgtgttgataatcagctcaaagaaaaaattaaattgatttgggaaaataattatcgtgcctatggttatccacgaataacgatggtgcttcgcaagtcaggcatctgtgttgggtcaaaacgaattttacgattaatgagggaaatggagattcactctttaatgaatcggcgatttaaaaaacctggcactcatgtggatcattcacaacgccccaatttaatcaagcaccagcccaatgcaaggatatggcgtgctgacattacttatttggaattacgtccaggaacctgggtttatctcagttctatttacgaaccaaaggttcatcaagttcttgctttcaagattggtcgtcagatggaggcgacgttagttgtagaaacgattaatcaggcgcttgaatgtcatcaaaagccacaatattttcactctgacatgggttcacagtacaccagcaacgaagttgaaactttacttgaacggcatcagatcagccactcatactcaaaacaaggttatccttatgataatgggccaattgaagcttttcactcattgttgaagagagagtttgcctttcaaacaactttttccaattttgaggacttggtaatccgaacctcaaattacatcagttggtttaattccgacagaattagaacgagtgtttagaaaaagatgtgccatttattgacataggagcagagtgtactacttcacaaataatttcaacgataaaattaattcagaaattcattttttgaatcatacatttagctaatgctcgtaataatttgattgatataagtttcatcatgcgaatcactaataacacgaccactgggaatctcatttacatattttcctttgataggtattcgtgtctgagcatgcattttaaaccattcgtattcaacatccgcatggccaatatctatcgcttgatagcccaaaatagataaatcaaatgctaataccgttgctgttggtcctaatgcaatcagaattaaatcatcaatatttgaatgttgtcgtgttacttttaatatttctgaataagaagcaaatgcgttgttatgcggacagataattcgctgtacacttttagtgttttcaagaagactattaccaacgccaaatctagtctggtctccttccaccaaaatcacatttttattattccataactcctttaactttttaaagtagcttaaactatcattcttgtttaccctatcaacataaggccttgttatatttgcatcataataaaccttatttttgtcagtaaactccagccacttaaatccatactcaccaattaaaaagcgccatgaatctgcactatagggcacatactgcttaaccgatttaaaaacatcaggaatacaaataatgatgtcctcactatctgatatcaaaattttgcgtagtcgctgtgccagctctggggaattatcttgaaacgaatttttattgttattcatcatccatttaaactcaccgtctccataacgagcaaccgagactttattttttataatatagtctaacgtttccgatatattcatcactttgggcttatcagaaaacaacataaacatcaagtatctgatcagaaatacaggatggcaaagtttcctaaatagctcatataaaaaagagtttgataatttatgtttaaaaaaatcctttattgtatgacgaagtcttttattattcaatctataaatatcctcctaaaacaaactatactcaattaaataaattattattatacaataaataactaattgatggccccacgtcaacaaactctatagtaatataaagtaataagttgactactaaaagtatgctcattattgacttactaatataaaatcctttttttaaattaaaatacataataaaacttacatagaccgcgaaagtagtattacgtgatattctcaaaaaattaccatcaatgaaactcaggggtatagttaacaacccaacacacgcaagcgccatcaatatagtaattttattttttgtattcttatttagctcattgttaagtattatcctacgatagcagaaataaactaaaatgaaactaaataatgcaattaaatcattaattatccaaccgttatgaatgctatcaaactgtaaataattactgacaccccgcattgaagataactgattccccaaaataatgataatattattggttactgttttattcatcatagcaataaacattagaaatattacaacaatatatatcttgagcatatttttcggagaaattcttagtataatatatattaacggatatattaagaatatataaccaagagactgaatagaagcagcaagtaatataaaaataatagaaataacaaatctttttttagtaaaatcaattaaaaaagttgttgaccagactagtaatgccatcattaatgaatttctaatttgaatagcatcataaacgaaaggagaaaataaatacaagatacaaaataaattagtattcttagaactaaatttcctcattgaacaaactaatagaagaaaaataatactatatgttagtatacgaaatcctgtatatgaaattcctgcatactgaaagggagtcatatagagtaagaaacccttatcatatgttgttgctttatacccaaattcatataaagcacgataagcattataatctggtacaaaactacttgtataaccaacaattatagtttgtacaagaaataaccagaataatgatatattactcaatgaccgcacattatttgttagtaagcagccaccgactgcaattatcaataatcctagtaacatttaatcacctaaattcacaaaataatattcatacttaaaactctatggttaattttaaaccactcagtataccattaaaaatacttattaatttatccttcttattgctttcatacaatattactaacgtaattatttttaatagacgtaatattgtcataaatgagataaaatttttatggtactttcgtgaaatataaattatattttgtgccatataaaacttgcggaacgctgaatgattctgtatttcgattttaaatcccaataatttagaatatgtaattttcccaatttcgtgtattaataccgcattattaactctgattatcttatagccgagcttcctaacacgtatgcaaaagtcaaaatcaacccaatctataaacatctgttcatcatattttccaaccttttcccacactgaaacatttgtaagcgctccagatgtaatacacttatctaataacaaagttgcttcacttgcaagagtttcaaaactagtatttctatctcttatggtgggacatataataccaacgctttctatttcaatgaaattaaaatatttttgtaacatatctttttcagctacagaatcttgatcaagagtaagtacccactctgtccgattattttgtaatgttgccattatctgatttaaagcagtagcaataccaagattttttatatttttaatcaaagttatgttgtaacctttaatcaactcagtaagctcattgatattatttgaattattatctacaatcacaagattcttacactgtttataaatagattcaatattcatacgtagtctctcaatatttggattataggttactattccaactccaattttaatcatgataactccttaatacttatcaaataatatttgcaatttacatataacaacaactggaaaaaaactatagttcagtttagaactaaataataattgaaacttttttctaatcgaatctctatacgttgctatgtttgttactaatacttcattatcctctctgaggtactttttaaattcccctgcaagaattctagaagtattatattttaaagattcttcgcggcttaaattaatctcttttaaaattctttttaaagtgatttttccggaagacgttgtattagtttcatatcgcctaaaataaatatatgagtgcgaatcatatatagtctttccgccaattgccaaatttagtctataaatccatgaatcatgtccagcaagttgatttatattatttgtgctaatactcaagttatttaaattgttattaaaaaccatcgtacagcccgctacactacttcttatcatagcatgaccaaaattaatatcttgtaaattatactgtttttcacctaacttttttagatccttatccactaaagtaagtcctgaaaaatataatttgtacttattgttacctttacctaactgtttaatcgcgctaattagtttgtcaggtaaccacacatcatcctgatcacaaaaagcataataatctgcagtatttttagctaatctacataaactaaaaaagctccttgtatatccaaggttatgttcaagaaaaacagttattcgaggatccttttctgcaaactttctaactatattcttagtagaatcacttgaaccatcatcccgtataaataaatgtactttaactcctacctgagaaagcacactttctatctgctcttctaaaaaacattctccattatatgttgataatagtaccgaaactgtctccatactaaattatattctccaagtcatttattatacaaatctactataaatatttaacataattttattgacacattttttatcaaacttttgagcaaccaatcgattattactgcccattttcttacgtaactcgtcattctctagcaagacttcaataccgtttgaaaatccaaaagtatccaacggatcataataatatcctgtaattccctgttttgtataatctctaataccatttatattagaagctaataacggtaaaccactagccattgcctcaattcccgcaagaccaaatccctcacgcaatgaaggcataatagcaaggtcagctattctatatatttcttccacatgaggttgatatcccaaaaaatgtacttgattatttagccctaatctacctaccaaatctctcaaatttttttcctcattaccaataccacataacaataaattaatatttttattctttagtaacgagattgccttaatagtcatttcttgattctttcgcttacttaactctcctacttgtattactgtaaatttattattaatttttaactttaattccttattaataggtgcgttcaaaaatttattagtatcaattccaacactaggaatataatcaacattctttgcatagaacttttgttttgccctgttaaaatcttctttattaatagttattaagtcatcagtaaaaccagataatattttttctattggataaaataacaaccagtctttttttcgcccacctgtgaagaattgaaaaccatgagctgtataaatcactggaatatgttttttctttccaactaatcttgccaaaacgctagctaacggggaatgagtgtgtatcaaagagaaacgagtctcacctgtaatatgaagtaattgtttataggccgtcaaattcgaattaatcgttccgattccacgagaaaaatcgacttgataatataaaacattatgctcttttagatattgtttaaaatccgtaacctgttgcttatccatagaatctccagattcgaaattggttgcaacacttatagtacatcccttatcctgtaacattctaatattgtcgagattgaactgttttatcatcgatgctaccgatgatatcattagaacattctttccctttatcattatctagctccatccccggtcactacaacacgaattgtctcaaagaaaatctcaatatcagtcaataccccaaaatgctttatgtagtacatatcattagcaagcttttgtgctggcgtatcatcgtaaccaccgtgaacttgagcataaccgcttagaccgggtttaaccaataaacgttgctcaaaaccttcaatgtcttcactgaattgttgcgtgaatattggccgttctggtcttggaccaatcaaactcatgtcccctttaattactgaccacaattgtggtaattcatccactcgagttttacgcataaaatgaccaacccgtgttacgcgtgggtcttctttctttgcccacattgcaccagatttcttctccgcatcactatacattgatcgtagcttagttactttaaacgattggcccattagcccaacacgctcttggctatagaagcacttgcccggtgtttctaacttaactaaaatcatagaaattagaataataattgaagctggaatcatcaatagcgttgcgaagattagatcgaataaacgcttaaatggtaaatagatgtgatgaaacggttgatccaatttagctacaaaatcatgttcatctactgtttgtgtatgactggtttggttttccatgataagattccccctaatccgttaacgattcccaatataactttaacccagtcataatatcataatgcggctgatagcctaaacgtcttaatcgtgtaatatctgcatatgagtgcttaatatctccaacacgttcaactttatgaataatttgtagctcccgattaataatttgttcatacacctgaattacttgattaaggctagtatgtttaccggcaccaacattaaaaacttgatgtacgatgttgctacccttcgtcaataggcataatgcttggattacgtctttaataaagacaaaatcacgcgtttgttcaccatcaccgaaaattgtaaattccgattggtgtttagctgcttgcgtgattaatgacaatacccctgaatacggtgatttaggattctgtcgtggtccataaacattgaagaaccgtaccgccactgttggaatattgtatagttttccataatcaattacaaaacgttcagttgcaaatttatcaattgcatacggtgtcaacggatcaattgttgagtcctcacgtttaggtaattcagaattatttccataaactgccgctgacgaagtaaacaacacttttttaacatttaatttattttgacgaattgtttctaagatgaaaatattcgcctcttgattgatttggtgggtttcatacggccgtgccaccgaatcggcaacactagcaatggccgctaataaatagatataatcaaaattctctttgagtaatagttcttgcataaagtcatggtcagtaatgctgtgttcgtaaaaggtcactttagatgagctaggaatgttactcgccaagcccattgataagtcatcaacaataacgacctcatcgccatcttgtattaactgatcaactaaatttgacccaataaaaccggcaccgccggtcactaaaactttacccaattatctttcctccaaattcaactattacctaaataaccaaaacttctttttttctttaacatggtggtactcactcggctctaagacatcgccgttaataatctttttggcgttgtcttgcatccaggtcaccatttccgccccattatgctgctccagcttagcgaacgccttctgcatccggaaattacggccctttaagttatgtgcgtcagaggcaaaaacaaagcctaagccggcatcaatgattcgctgcgtaaagtcttcgacctcagaaccaaatacgcctaagtagctgctggcggtgatctgggtcaagcaaccgctagccacaaaatcataaagcagatcgtgattcttttgaatgccgtgattgcgttcaggatggacgatcactggtgtgataccggctgcctgcagttcaaaaatcattttgtcggtgtattccggcacttcaccgtgggaaagctccaacatcaagtagcgattagtttcatcagcgaacaacacgtcatcatttttaatggcttgcattaagtcaccattgatatgtgcttcttgccctgggaagacaactaaatcgattttagcttcatccaacgctgcttgaaattctgcagtccgctgaatcacgtcagccttatgattggtatatttgccgtccatgtggtgtggcgtcaccaaaatatgactaataccgttatcgacagccactcgggccatcgctaaggcatcagccatggtatgcgccccatcatcacatcccggtaagatatgacaatgtagatcgatcatttcttatcgtccgttccgtaatacccaccgtagtaaccgccagaagctgcatctgtcacgcggttaagtacggcaccgatcaggttttttgagtaaatcgcgcgcccgtaaaacagcccctttaagagcgataccttgggggaccaccaagatcacgccgtcaaccttacttgctagaatttgtgcatcggtgaccctattaactggttgcacgcccagaacaattataccaaattgttccccaaattgcaagaacaaattagccacacgataaatcctattaaatcagtattttcattaatattcatattttatggacttaacttaaccggcggaagcagcggagaaaagctctttgggtgtttgatagccagtttgccggcgcggtaaaaggtttagttagttacttatttatcttctgtcccgtagtagccaccatagtagccacccgtattttctgctttaacccgattcatgatggtgcctaaaattcgtgcattaacgacttctaacaactcttttgccttggcaaccgaacccttttcaacaatcccttgtggtaccaccaaaattgtcccatcaactttgcttgccaaaatctgcgcatctgttactgaaataacgggtggtgtatcaaaaatcactaaatcaaagtgctttgtcaattctaaaattaatttatccattttctttgtatttaacaattcagacgggtttggtggtacgacaccacacggtaaaacgaatagatgatcaaccggtgttttttgaatcgcactatttaaatcgaaggtttcttccgttaatagtgatgttaagccttttttatttggcacttggaaagtttgatggactgttggacggcgcatatcggcatcgaccaataagacatctaccccttgatcagcccaggtcacggcaacattcgcacttaccgttgatttaccttgcgaagggcctgatgacgtgaagacaacactgcgcaacttttgatcgattgatgaaaattgaatattcgtgcggattgtccggaattgttccgcaataactgaagtcggatcagttaaagtaattaaaccgaccccttctttcatactatcttggtctagtttcttttcttttctaaataatcccattttcttaccctcttcttgataagcggctggtacttacgctcataatcgctttcttgattaaatctttttcagcaatattattaacaatccctagactagttaaccctaattcttccgttaaaaatccttcatcttttactgtcttgtccgttagttcacgtaaaaaggctatcccaactcccagtaatagacctaatacaactccaatcaaaacatatagattctttttgggagatactggatttaggttgggacttgcttgggaaataattgaaacattatcagttccactcataattttaggtgctttcttctgaaaagtctgtgctgttgtattcgcaatatctgcagcagtatacgcattatcagcctttacattaatggagaacacttgagagttttgattatttgcaatatcaatcatatttgcaatttgcccctcatttattttttcatcgttacctttattaatcttttcagcaacagtatccataataaccggtttcgtgattaaatctttatacgttgtaatcatttgaacatcagcttgaacttgattcagctgagcgccaacatcagtattttgtttacggttaactagcaactctgttgaagcgctatattgtggtgtaatcaaaaagaatgtcacgataacagctaataatgtacacaccactgtcgatgatagaattaaccggtgatacttacgtaaaataccgaaaatttgctcaatgttgattgtttgttccatgataccctccaaaagttaattaatgcttataactactttgcaacacgcgaaaagaagttaaccatcgctggttagcttcctcccgtgttattttaaatctaattgggttcttaaaagtctcgacatattcgccacttcagatgaactcatcacttggaaagattgtccgtcaatcatttgaccaattcccttcaattgatgcgtcttaaagttcattgcatccccataatttttctggatattaattgcatctttcaaggtaatattggtttgcatattattttctaagacttgtaaaaaattattataattcgtcaccatattcaatgaaaaagccttcttcaaaactgcttgtacgatagattgttggcgcaactgacgaccaaaatcacctctggagtcttcatggcgcattcgtgaaaatgccaatgcttcttcaccattcaaggatacgggccctacgctaaagtgatgtccatcttgtgtgaagtctaaatcattctcaacagtcaccccatcgaccgcatctactaattgttccaagcccttcatgttaaccagtacgtaataatcgaccggtacgttcaagaaggcttgcacggtattgactaccatcggaatgccaccgtaggcataagccgcgttaatcttagccgtttgaccgtaaccaacgattggcacccgtgaatcccgggcgatactcaacatgttggtttccttagtcgttggattgaccgttgcgagcatcattgtatcagtccggcctttttcggttcggcctagttcccctgtatctgtaccgagtaagaggatcgagaaaggcgtcttcttatttagttcgactttttctgaaactttgcgcttattttgtgtcttacctttggatttatacactgtcttggcggtttgattaacatccatatagaccttagctgcgaatgcgcccccggcaagaatcaataccccaagaacaactaaaatcacttttgttaatgtccaccctctgcgccggtgcttatggtgatggtgtcgcttctgttcttctgcagtcatccgtttcgtatcctcctcgaaaaataaacaaaaaaataatcaatcacattacatactatttacatactatttataatcataatattttctattgtagtataacttttattaaaaagaaatctttttctggagtacaccttaataaaaaacacttagttttcacactaaattgtgaataacccccttaacattgggcagtgattcaatattcaagatttttaaataattaaatatttttaaagtatcgaaagtgaaagtggtttacgaaatctaagtccatcaaaaaaccgatatgtaaaaacattagtttgacatatcggttgagataaataattttaattttagagactaaaaataggttgtaatcatccggttgattcccgaattcttacaacctatataattggttaacgtttcaattcatatttgtgctttgtctcattaatttttcggctgtcattcattttgatcgcgccgacgcgcaatgaagtcatgaaccttaccgcgactggcgttaacatgcccatgcagtgcttcttcaatcacaacattcaagacagccccaaccatcagaatcgttgcggaataattcagccacaagagtaagataatcaccgcaccgattgcaccgtaactattccatgacgtgccgaagtaacgaatatacaatgagaatgcttgtgcaagaattaaccagccaaccgttgtcagtgctgcccctggcagaacacttcgcaatcgcattttcacattcggaacgaagaaatagatgaaaatcagcagtaggaacaaggcaatccccgtcactggccattttaaactactaaaaatattaacgtaggtcttaggaatgttaaagattgggactaataattccaaaatttgttgcccgaatgtaaaaacaacaattaaaccgactaataatagaagtaataataatgtactccccaaagaaatcaggcgttttaaaacaaagttctgaactttttcaacacgatacgcgcggttaatactattttttaaggcattaatccccatgctcgctgcccacaacgtccccaagatcccgacggacaataagccatcattgcgtttcttcaatagggactgcagaactggcataatcttgtcgaatatcgtgggcggcaccgccgtttggacgtaatccgccacactcattacatctaactggaagtacggtaagatgttcccgataacgattaatagtgggaagattgataataacgaataatatgcgattaccttcgaattatcactaatgcttgcttctgatgaacgcaacatcattaacttcaccacagcaatcaacttctgccgtctggataagtcctgttttaccaccggtaactggttttgattgtctactgtcatatgtcactccaaattctcttttacacattagtcgttctacctgaaaggcttattttcccgacttcttaaggcatgtttatcatttctattatacacgaattaactatgggctaatagttttctgaaagcaaaaaaaaaaaccttctcattttagagaaggtttctaattttatagtaaatatttagcatccatttctggatcttgtgaggttagaatcttaggaccatctttggtaatcgcaattgtgtgttcatattgcgcacatggtgtgccatctgctgagacgtaatattcccagtcttcgccagggacttcttttgacttgatgtgccatgtgccacctaagatgaccattggttcaattgtgatggtcatcccttctttaaggcgcaagcccttgcccgcttcaccgtatgaaggcacgtttggttgttcgtgcatcgttggttgaataccatgtccaatcaattcacggacgtcaccgtagctgttttcaacttcggtatattgttggatggcgtggccgatatcacctaggcgattgccgacaacggcttgatcaatgcctaagtagagtgctttgcgcgtatcgtccattaatttttgtaattctggtgcgatttcgccaaccgcataagtccagcaagaatcactttcataaccgtccaagttaacggtcatgtcgacactgacaatgtcgccttcttttagaattaagttcttccgtggaatggcatgtgccacttcctcattcacgcagacacaagttgcgtacttgtagccttcaaagcctttttcagatgctttggcaccgtgttgttcgatgtagtcgtttgcgaattcttcaattacccagctcgaaatacctggtttgatgatgtcgcgcaaaccgcgatgaacgccggcaataatggcgccagaagcagccatccctttaatttctcgttcagattttaatgtaatcaaaatgaaacctccaatattgttaccattgtagcctttaattgtatctatttctatattatacgctatctgccattaaaatggacgaatcgtcgctttttagttcaattaaccgtgaaagagccgttgcaccttttcttaataaggggcttttgctataatgccttatagtataattcgttaattgcggccactgagcgccgcgtacgtgaaaggatgtcccaataatggcaactgctaaagtagtctatgcaagtatgaccggcaataacgaggaaattgccgaaatcgttgaagaagccctcgaaagtttgaacgtcgacgttgaaaccactgaaatctctcaagcagatcctgccgattttgaagacagcgatatctgtatcgtctgcagctacacctatggcgatgatggcgatctccccgatgaagccgttgatttctacgaagatctcaaggatattgatttaactggtaaagtctacggtgtctgtggctccggtgatacgttctacgatgacttctgtaaagtggttgatgatttcgcagccgtcttcgaacaaaccggcgcaacaaagggttcagacgttgtcaaagtcgatctatcagcagaagcagaagatatcgaacatcttgaaaaattcgtatcagagattgtcgcaaaacagagtgcgtcataagctcggtcagtatccgagcactaacctagtctggcacaggatactagcttataaagcacgtttcaaggcagagtgcgtttgaaacggttatgctttgagcattaactggatttgccgaataggtgatgcaatcacctatttggtaaatttggttaagggcagaagtatgtttcaacaagcacgtttcaaccaatcttccctgggccgcggttacgtccctttttaccgcggcccttcttttggtcttttagaccttaataaatcaaactaggagctgtctttatggctttcattaaacggttagtgtttaaataccgcgattttttgacctatacgatttttggttttttagcatcgttggttaatatttttacttactgggtatttcgccacaccattatttggccgtatttactcgccaatacaatggcgtggtttgtcgcgaatttatttggcttttttaccaataagtcgcttgtattccaatccaaatacaccacgtttggcgctgtgtgtcgtgaagtgctttcgtttttctttttccgtggtgtatcctttttcttggataacggtttgatgattgtcgccatctccttcttagggtggcagagtatgaccgccaagattatcgatcagttaatcgtcggcattgtcaactacatcaccacccgctacactttcaaaaaaacagaacaacaaatggcactccggggtcggattctccggcgatacaatgctattttgaaaagaggtcacaatgattaaagccattcaacaactcattcaaaaatactgggaacaattaatgtacttggtctttggtgtcttaacaaccctagtcaacatggtcgttttcttcggattagaccactatacaactatcaattatctcgtcagcaacacgattgcctggttcttatccgtgctatttgcctttttcaccaataaaacgtgggtctttcagtcaaaatatacaactttaaaggacttttcccgcgaaatggctagtttctttttcttccgtggtatatcatttataatggatactgcaattatgtttgttgggatttccttattggtatggcccaacatgcttgttaaagtgctagatcagattatcgtgattttagcgaactatgtatttagcaaatggattttcaaagatacttcggaggattaagatgactaagacgatttcaattattgtaccctgttataacgagcaagaatcaattccgcttttctacgcagcagttgagaaagtagcggctactctagccgaccaccgcatcgaatacatcttcgttaacgatggttctgctgatgaaagcctggcggaaatgcgcgcgttacaggcacaagaccctgaacacgttcactacatttcattctctcggaacttcggtaaagaggctgccttgtatgctggcttacaagccgcaactggcgactacgtttcagtgatggatgttgacttacaagatccgcctgaactattacccgaaatgattcacggcattgaagtcgaaggttatgactgtgtcggcactcgccggacaacacgtgcgggtgaaccccccgttcgttcgttcttcgctaaacaattttacaagattatcaaccggatttcacaaactgaaatcgtggatggtgctcgtgattatcgcttgatgactcggcagatggtcaatgccatcttagagatgtctgaatataaccgtttttcaaaagggattttcagttgggtcggctttgacaccaagtacttagaatataagaaccaagaccgcgttgctggtcaaaccagttggtcattctggggactcttcaaatattcattggatgggattgtaactttctcagaaacaccattagccattgcgtccttcgtcggctttttctcattcgcgattgccctgcttgcattaatcttcatcgttattcgtgcttttatttttggcgatccaacaagcggttggccatcactcatttcagttatcctaatggtcggcggtttacaactcctatgcctagggattgtcggcaaatacatcggcaaaatctacctagaagttaaaaacagaccagtgtatattgtgaaagaaaagaaataaagtgcgtttggttgcacttagcaactgagtattaagacaaaaaacagtttgaatccgcacgtttatctcatcaaaaaaagccctcgccattatcagtcaaaatgataatggtcgagggctttttcaatgctcattatttaaacgcttctggtttttcttttgattgaccaaaatgataagcaattgcatctaaaatccgttgagatgcttgtccatcaccatatggattcttggcatgggccattgcttcatatacggcttgatcatctaataattcaaccatggcatcatgaacttgttctggttgtgtcccaaccaacttcaacgtgcctgcttcaaccccttcaggtcgttcagttgtatcccgtaagaccaacacaggtttgcctaatgacggtgcttcttcttgcacaccaccagaatcagacatgatgaagaaactccgtgcagctaagttgtggaaatcaacaacatccaatggatcaattaaatgaatccgtgggtgattgcctaagatatcttgcgctgcttcttgcacaacagggttcaaatgcactggataaacgatttcaacatcatcatgggtttcaacaacttggcgcattaccttgaagacccgtttcattggttcaccttggttttcacgtcgatgcattgttactagaatcattcgtttgtcagcatcaacaacatccaagattgaatgattgtagtcgctttgaaccgtttgtttcaatgcatcaattgctgtattccctgtaatgtaaatagccttttgtgggtgattttcttgtaataagttggcttcacttttactggttggtgcaaaataaagatcactgagtacatctgttaattggcgattcatttcttctgggaatggtgaatacttatcccaagttcttagtcctgcttcaacatggccaatcgctgtttgattgtagaatgcactaatgcttgctgcgaaagtagtggttgtatccccatggactaatacgatatccggtttttcagttgcaatcactttatcaaggttcattaatacgttgctagtaatttcactaagtgtttgtcgttgtttcataacgtccaaatcgtaatctggtttaattttaaaaatttcaagcacttgatctaacatttgacgatgttgggcagttaccaccgtcacagcttcgaattcatctgagcgttctttcaatgctaatactagcggcgccatcttaattgcttctggtcgtgtcccaaaaacagtcattactttaattttagacacaaatttgcctcctaccatttaataagttaacacctcctatattacacgttttataagggtttgccaatccattgcagtcttattcccttgagtcaaatgaataacagtctgaatattaaaaaggacgcctttttaggcgtctctttttaataacattgcttcaacattcgcttgagcatcgcgtctatttctgcgtcactatagtgtaccaacttcgcattcgttaaggtcgccaaacccgtaataatgatccacgcttcgttaataatgcgttcgtgttctgactcactaaccgtttttaacggttgatagtcctccaatctagtttgtgtcaattgccccatgaaaagttgtgcttcatccttaccaaagtggttatcaataaataacgcacggtaaagttctggttcgattgtagcaaaatgaatatagccaatcccgagattgactaaggcatcatctgttcgttgttcttcactgacataccacaccaaacgcgccttggcttgttccaaaatggcttgcttgagattggccatattaccgaattctaaatagatgggttgtgtcgaacagtctagtgccttggcaaggctgcgcgctgtaattgcttttaaaccatccgctaataccatttcgtatgctttatccagaatttgctccgctttaatccgttttgtccgtgccatcgttcccactccttaaccgatcaatccgtttttcaatattatctactgtcactctaccacaaaattaaataacatgaaaacgtttttatctattttacgagttttttaaatcgccatgtgctatgataaacatattaaatcgcccttaaggaggaatttttgatgactactttccaacataatcttgaaaaatacgctgctttagtcgctaaaacaggaattaacgtccaacctggtgatacagtggttttacaaatcgctgttgatcaagctgaactagcccgtgatatgacagctgcttgctacgatctcggagcagcagaagtgattatcaaatggcaagatgatgacatcgatcggatcaatatgcaacacaaagccgaagatcgcctcgttaacgtgccagacttccagaaacaagaatacgattactggttagcaaataacgccaaacggatttcggtgatgtcgagcaatcctgataaccttaagggcctcgatggtgatcgggtcgctgctgttcaaaaggcaaacggtcaagcaatgcttaaagttcgccaagcaacacaagccaacaaaaatagttggattgtaattgccgcagctagtcccgcttgggcaaagaaagtctttcctgatatggacgaacaagccgcaactgataagttatggacagagattttcaaaacaacccgggtagataaagaagacccaatccttgcttgggaacaacatggcaagaaactgcaagccaaagccgctgaattaaacgctgcgcaatacaaagcactccattacacagctcctggcactgatctcacaattgggttacctgaaaaccacatctggatgggtggtcctagccgtagtagtgatggtcgttcattcgtcgctaacatgcctactgaggaagttttctcagcagctgatgccaacaacgtcgatggctacatttcttctacgaaaccattgagttacgctggtaacacactcaataacatgcaatttacttttgaaaacggcaaagtggtcaaagccaccgctgaagaaggcaacgatgtcttacaaaaactcttacaaaccgatgctggggtcaagagcctaggtgaagtcgcacttgtaccagatccttcaccaatttcacaatcaaagatcaccttctacaataccttatttgacgaaaatgcttcaaaccatttggcactcggctctgcttacgccttttcaattgaaggcggcacagatatgtctgaagaggaattaaaagcagctggtttaaaccgtagtcaagcccacgttgacttcatggtcggttccagtcaaatgaacatcgatggcttaacacacgacggtcagattgtccccattttcagaaacggtgactgggctgactaatgattacatggctcatgctccttggcgtctgcgtttgtctaaccaccttcttcattggactaaccgcctatagcgcctaccagaaacaagcgattggtggtctaatcattgtgtgcgttgccggtttagtcttaaccgcaatcgcggcattcttctactaccaagcactgacgcatttataattcgaaagggtcacgacaaaatttttgttgcgaccctttttgatgtgctagactgttggcatactttttgttcactatatcattattcgttagtaataatgattcgtatgtactggtataacaggttttatacaatgtttttgttgtgaacaattgctcaaaaacaattgataatccttctcaattagctataatgaagttaaatcaaccagaggagtccgccattatgaaagaattatccgccagtgcaccacttgaacatcgtttccatttatcagaacgtttgaacattatccgcgccggcgttttaggggcaaatgacggcattatctctgtagctggaatcgtagtgggtgtcgcgagcgcccaccaaagtcagtacacgatttttcttgctggtatttctggcatgcttgctggcgccttttcaatgggtggcggtgaatacgtctcggtcagcacgcaacgtgacacgcagaaatccatgatgcggcttcaaaaagaagccatccaaaacgaatacgctgctgaagtggccagtctacaacggacttacgaatcaaaaggcttacccactccacttgcacatcaggtagcttcagcgttcatgcaaaaagacagtcttgacatcacactccgcgaaaaatacaatattgaattacaccattacttcaacccgtggcatgccgccttttcatcatttttctcattcatgttaggctcattgctgccaatcatcgccatcctagcaattccatacccttacaaagtcagtggaactattggttcaattgtccttgcccttatcgcgaccggttacacgagtgcaacgttaggcaaggcaaaccgactcaaaggtgttttacgcaacgtcttaaccggcgtcttaaccatggtcgtcacctatttaattggtggttctatcggctaagcttcacttttaacctaaaatttgctatgctatatttaatttaatcgtcgccacggggcagttaatcacttcattaggtcaaagaagaagtgattggctgtcctttttttgtggccgatattattaggaggttctattgtgtggcatgggttgatttattgattgcaggattggcagaagtttggtgggcaacgactatgaagatgagtggtgggttcactaagctcaattacacattactgacgattgctggcatgctcgtcagcttcggttttctaattcgtgcgacgaagggattaccattgagcattgcttatccggtttggaccggaattggcgcagtgggagctattttagtcggcatcatcttattcaatgaacacatttctttattaacctggctattcgttattttattagtaatcggaattctcggcattaaaatgacgagtggtcattaaaaaataggcttacccattttgggtaagccttatttattaacgtgttctaattgccaactcgcgatagtttgaatcaactcgattggtaatgccgttacatctttttcgaattgtagtgtccctttgccggtctgacatggtgcgacagcttttgcaaaatgggccatcggttgattagtgggataaaacccgatgtgccgtttattaatgccaaaatagcaaactgctttaggctgataatacccaaccaaaccataagccagcttcatctctgcgtccggtaacactgcccaaagaatggtgtgcattgccagtgcgagtgttcgatcagcatcagttgtaaggcctgcattatattgctcaataactgtcatcttatccccacctttattttgctctcattctagcatgaaaccacaaaaaaagcccaaccgaagttggactcttgaaaaacaataattatttaacagctggtgtaccgaaccattcgatacgtgattcaactgtgtctttgattgcttttgtacctggtgcaagaactttacgaggatcgaagcctttttcagcttgatctttgttttctgcatagtattctttaacagcgtttgaccatgcgatttgttgttctgtattaacgttaacttttgagatacccatttcgattgctttaaggatttgttccttaggaatacctgaaccaccatgtaatacaagtggtaagtcaatagcgtcagctaattcttgtaaacggtcaaagcttaaaccttgccagttttcagggtatacaccatgaatattaccaataccaactgctaagtagtcaggaccagcagctgctaattgtttagcttcttcaacgtcagctaattcgccagcaccgatgataccgtcttcttcgccaccaattgaaccaacttcggcttcaactgagatgcctttagcatgtgctaaagcaacgatttcttttgtctttgctaagttttcttcgaatggtaaatcatgaccatcgaacataactgagttgtaaccaacttcgatacattctttagcagcttcgtagttaccgtgatctaaatgcatgataacaggaactgtgatgttcattgacttgattgtttgttcaaccaagttcttgcataattcgtaaccacccatatatttagcagcacccattgatgtttggatcaagattggtgtgttagtttcttgagcagcacctaagatagcacgtgtccattcaaggttgtttgtgttgaaagcaccaacagcgtaatgaccttcacgagcagctttaaagatttctgtaccattaactaatgacatgaaaaagcctccagattaattgcaacttttgcgttgcgatttttgaatacgaatctattttaacatattttgacctaatataaatcataaatccgtaactttctgaaagtgaaagcgtaatcattctgcttgattattttacaccaattaaaaagcacactagttaatctagtgtgcttttacgacaattgcttcaaagtgcgcccggcgagaatcgaactcgcaacctatcgcttaggaggcgattgctctatccagttgagccacgagcgcctatgagtcatattgtcgcatctgttgttttaattgtaaagttgattttaataaatctttattcatccgttaaaacggcgttcatcgtttcttgacctaaaaagaacacggcaccagccgctaatagtatcgcacccgtaaaaagtgtaaaaatcacggctactgataccccctgctgaattagcgcaccaactaaaaatggcccaaccacaccgccaattcgcccgatgccagctgctaaaccactcccacttccacggacaagtgcaggatattgttctggggtataagcatatagcgccccccatgcaccaagattgaaaaaggataacagcgcaccggccacgagtaacatggcaactgagtttgcattgccaaacaataatgcactgagtgctgttccgattagaaagccacctaaaacacgtttccgcccccatttttcaatcaaccacgctgctacaaagtagcctggtaattgtgccaaggtcataatcagcacatattcaaaacttttaaccaagctgaacccttttaagaccatcacactggggagccataaaaacatcccatagtatgaaaagaccactaaaaaccatacgagccataacataattgttctttggcgatacgctggttcaaataaaacacgcaatcgttgcatgaatggtaccttacggttaatcgtcgtcggttcatgctcttgtttaacatgtttccgtaacacaagtgtgtagatggcgggcaatgacgtgatcaataagaccactcgccagccccaaactggaatgacaaaataggcgagtaaactggcaactaaccacccggctgcccaaaaactttctaacaatacgacagcccgaccgcgcgatgccgttggcgtattctccgagattaatgtcgaggctaccggtagctcgccacccaacccagcaccgaccaataaccggagtactagaaatagactcaacgatgtactaaaggcagatatcccattgccaatcgaaaatactaataaggaacaaagtaaactgttttttcgaccaattttatcagctaaaatgccgaaaatagcggcgccaaaaaccattccaattgaactgacactcccaattaatcccatttgtgcactactgagttgccactctcttgcaagcgcagcaatcacaaacgatagcatccccacatccattgcatcgaacaaccatgcaccacctgcagcccataaaagtgtcctatgttcttttgtcatcccgcattactcccttatgttatgaatggtcctatcatacaaaaagagtttacagatgtcaagacacctaattatgcattataataaatatttatctgtttaagcgctgcgacaatttgcttaaatcgttgttctgacgcgcattcaatcgtgtgtaaatgaatgccgtcggttaatgttgaaagtaatttctgatggggcattgtggccattttttgcataaagcctttgacatctgtcaaggtgccgattcccagttgaccggtcagttcaccatacaatggatgatcaacggtcacgtcgatcacgcgccccccattttcaacaatcgttgtcaattcaagttcagtctgcccctgattatgctgacaggcaacttgtgcctgatatggcattgtttgttgcgtctgcgtttggtcgtaataaccgctaactgtcgcaataatttgggccccttgtgcgcgaagtaaggcgatatccccaacaattgtctgccggctaactttatattgttgcgctaatactttggcactgatgggttgcgcactcttttgaattgcattcagaattgctgtacgtcgttcttgcgttgtcatattgccacctcgtcttgatttcttacgctatattctaagcgttctaaaggcaaaaagaaagtggagggttgaaacgaactcgtttttccggttaacctaaaaatacatattatggctttataaatattttttgaatatttattcaatctcgtttgacccgttatttcgttagcaatgagcttttctctcgctgacaacatagaatactataccaacaatccaagacatcgtcaagcgattgtttacttttttttgaataaaaatataaaaagtttcaaaagcgtacattgttgaatagatattcaccgattgtccgaactaattcaagtgcggaacactcgtgacttctaacttatccagtaatttcgtgaactcactagggttcgcaaatcgaaaaccggcttcactaattattctcaattgttcggtataaaaatcagtctcatgagctccccactgaaagacaaagaacgaaacgttctcaccttcaaggttaatattcgctaaattgatcaatctcaattcgttaacatcaatatttagctgtgcttggattgcaattaatacagcagcaagtggtgtttgatcatcttgcttattggtcaccagcatcttataagaagcatcaacttgtggttggaccaaaaaatcatattgtccttgctctgtcttatacataatcgttccggctactttagcactcatacattctcacccttattcaagtcttctatcgcttcttcagtccatcttggtaatcgttctgcaatgggcgcaaacccaatatgaatccggcgatttgtccaatagtgtttcttagcacgctgtggtgctaaatcttgtgctttatgtagcgcacgtaacgacaaactaatcttatgtgtgtattcatcgatatctaacactaatacatctaacacttgaccgactttaaactgttcatctaacgctttaacaaaaccatgaccacattctgagatgtggattaagccttggaccgttgcatctaatgaaacaaatacaccatatggttgaatgcctgttacagtacctgtaatcttttgtccaattcgataacccatattttcctccatttcaatattcctatctattttaagccttccagttagtaaaaggcaagctatcggctaagaccttttatacaattccttctataatatgtaaaaagaacctgaggaaacatccctcaggttctcatttaactaaagttgatcagctgctagtaaaagtgccccagtaatcccagcgtcatcccctaatgcaacatgcacgatgtagtcatcaaggtcaggcgtttgcacataacctgccatttgacgtttaaaggattcacgaatcattgggaatagttgggcttgtttcgacaccccaccaccgaagacaattcgttctggcgatagcattaaagcaatatttacacaagcttgagctaaatagtcagcttccatttgccatgcttgatgatcagccggcaataagtggcctttcttgccccaacggcgttcgattgctggaccagctgctaagccttccaaacaattgtggtgataaggacatgtcccttcgtatgaatcttctggttgttgccgaattaacatgtggccgatttcaggatggctgtaaccttgtaaaatctgaccgtgttcaacaacaccgccaccaatccccgtcccgacagttaagtaaacacaactatcaagtccatcagcagcgcccatcttcaattcaccataggctgcggcattcacatccgttgtaaaagcaaactgggtatcaggataatgagctttcattgctcctaagatatcatagtgttcccaccctgctttgggtgtatcgatgattgagccatatgtttttgatttcgggttaacatcaattgggccaaacgatgccaaaccaatggcatctaaatgatcgaattgatcaaaatattcaaataaccgtggcatcgtttgttccggcgtctcggttggcatactaattcgttcttgtatcccattttttccatctgttacggcacagacaaacttcgtgccccctccttcaattccacctactagcatctaaaacacctcttcaattaaaattaaagattaatcgtaatgtgattgatgataacttcttcaactggtttgtcttgcattcctgtttctgtagcgttgatcttattaacaacgtccatcccactcaagacgtgaccaaatacagtatgtttaaaatctaaccaaggtgtaccacccttttcataagccgtaatgacttcttctgggtaaccagcacctggcatttgtgacaacatgttttggttgatatgttcgtttgttacgatgaagaattggctgccgtttgtattaggaccagcattagccattgataatgcaccatttaagttaaagacttcttggttgaattcatcttcgaaaggttggccccagagactttcgccacccatcccagtaccggttggatcgccaccttgaatcatgaaatcgttgatgacccggtggaaaatcacaccgtcatagtaatctttttcagctaagccgataaagttttctactgtcttaggtgcttggtcttggaaaagtgctactgtaaattcgccacggtttgtgtcaaaagtagctgttggccctgcaaagtttgcaaggtctaattgtggatatgtcatttaatcgtcctccttgttttgactcacaatcattatgatagcgaattgcttcataaattactacgattatttcattaaacatgctttccttatttttttctagtatactaatttaagaaatctactattaaggaagttatctcatgcttgattcaaatcatctctttgatatcaccattattggcggcggtcctgtcggaatgtttgctgcctattatgctggtatgcgcaaggccgatgttcagattatcgaaagtctccccgaactcggtggtcaagtcgcaacactctatccagaaaagcaaatctatgatgtcgctggtttcagtggtatctctggtgcacagctcaccgaaaacttaattgaacagctggcacttttccaaccaaccttgcaattatccactgctgtgcaaggtatcgaaccccaagaagatgggactttcgttcttaaaacaacgaagggcacgacacgcaccaaaggcatcatcattgccgttgggaacggggctttcacaccgcgaaaactcgctgtcgattacgatccagaatgggaaaatcactatattcactacttcgcaaaagaaatggcgcagttcaaagatcaaaccgttgccgttgctggcggtggtgattcggccattgaatgggcactaatgctcgaaaaagtggctaaacaagtctatttaattcaccgtcgggatcaattccgcgggcttgaaagtagcgttgaagcactcaaacaatcaactgtccaaattaagacgccgtttttaatcgatagtttgaccgaaatgaaccaacaactcgcattaactttaaacaagatgaaatcaaccgatcaagagcagctaacaattgacaaactccttgttaactatgggtttatctctgatactcgaattctccgtgattggggattaacattggaccaccatcaagtcgctgttaaccaacaactcgagacgaacatcccgaacatctatgcgatcggcgatattgctacctaccctggtaaagtgaagttaattgccagcggatttggtgaagcaccaatggctgtgactgagttactaacgaatctctacccagaaaaacgccaaccactacacagcacgtccattatgtaagagtgcgcaatatgcccgattaccttctgaggattagcctagtccagtaaattagcgacgcagtcgatgatttactggccgtagctaaccggaagaaggtggcttatggagcacgtttcgataagagtgctttaactagcggttagcttctgagtatagcatcggttagtgaatgagccgcacagccgaccgtttgcaaaccgtggctaaacggaagaagttgctagctaaagcacgttttaaaaaagccctgcatcaacgttttaaccgttgatgcaggactttttagtattttattaagcattattttttttcatttgactcttaaccgctgtgataaccatcggaatcaatgagaccccgataatccctaacacaacgagtgagaaatgttcacgcacaacagcaatgtttccgaagaagtaaccagctccgcaacagagtgtcacccacaagatactcccaatcacgtcgtaacggaagaacttcatgaaggccatctggctcccaccggcaacaaatggaacgaatgttctaataatcggcatgaaacggccaattgcaatggttttaccaccatacttatcaaagaagacctgcgcctcttcaattttctcggtattgataaacttgccgaagaaccgattcttcgtggcggctaaaccgacccgttggccaatttgttcattcaatgaatcacccgcaattgaggcgattaagaacaaggcagcaaacagccagacattcaagtcattatcagtccgggctgccaaagcagcagcggcaaacaaaagcgagtcccccggtagaaacggtaagataaccgccccggtttcaacaaagataatggcaaacaagatgacataggtccagttgccgaactgattaacaatgttgaccaggtgggaatcaatatgtaaaacaaaatcaattaactgcgtcatgcgatttctcctatactctttttcaatttaaaaatatatcccttattaggataccgaatccatgcatcaaagcaatcacttttgcattttcttaataaaaagccaaacgttatagcgcacgtttaccgcgccataacagccaagcaaaactaccctctaacaaaatgaagaagagtgtaaaacaaaggccaaaatagacttccggtaacactaagataatcggatcagtgattggatcaaactgccagttcagattgcgaaacaataattcgtggaacgtaatgaaaaaccgatcgaaattcatactagcaataaaccctaatatgggtggcaccacaagagcaacttgcattgggcggacgtattgccaaacccgattggtcttgcgccgactccgccaatgctgaatcgccgctccaatcgttactagccaaataactactgctaaaccaaacaagcgtttcacttcaacaaaatgttgccgaccatccaatgacattggaaagtcaggtagttgtaagcgtggttgccatggcacaagtaagtagcccattaaccggttaaagttcatcatcagccgcggttgcgttaattcccgttgactcgctagatcgaggtagtgactcactagcggataaagtgcccagcttaacaataacgttattaaaatcgcactgctgactaacgccaaatacaacgccgcccaactagtggtacttctaacccgctttaaacgtcccattcggttaagtcgttaatgatatgcgttggttgcaaggcttcttttgccacatcctctggcgttgaaacaccagtgtaaactaacaacgtatccatccctgcattcaagccagccttgatatctgtattgtagttatcgccaaccatcaccacttgttccttcgtcaagccgaattgctctaaggccatttccataatgattttttcaggcttaccgatatagagtgcactttgttgcgttgcccgttcaaccatcgcaatcactgaaccagcacctggcactagcccgcgttcgtttggtaaattcgtatccgcattggtgccgatgaataatgcaccgcgcttaatcgctaacgttgctaattcaaacttgtgataagtcacatcataatccaaaccaactaccacgtagtctggatcgaattcattggtcctaaaaccggcatctgatagagcctgcttcaaaccgagttctccaatcacgtagaccgttttgccattcgctgtaccaccgtttaaattcaatagatagcgcgccgttgccaaagaaggggtatacacttggtcaactgtcgcatgaatgtcatggttatccgccaaattctgaatcacagcagctggtgatttcgtagtgttgttcgtcaaaaacatgaacggaatttgttttgcttgtaggcgttcaatgaaatctttggcttctggcatccgatcacggccgcgatacacggtgccgtctaaatcaattaaataccctgcataatctgtgtttgtcatagttgtctaactccaattacgttttactttttattgtgttccaaaggacggatcttaaaatgacgcttattaactgatttttgattctcggttaccgccttttgagggcgttctttagtcactttttgcttgttatcggtgactttccgttctgtaaaacctggcttttgacgccgacgccgttgctgaccacgttggcgattactccgccgattctcattcttaatgattggcttgccttgacgttccaaaacaaagtaggcacaaccaaagttgcagtattcgtatagataatcttgtaacgtattgattaattgatctttattagcgcgtttgttggttgctttgtaaaagcccttcaaacgcagttgttcaaagccccagtcagccacaatataatcgtacttagccaacacttcattatagcgttcgttcaacttttcagcgtcgaagccttcacgatagttcacaacgacttcataagcacatttatcaatctcaagcgtggtttcagtcttcatgacaacgtgttgtggcacttccggttgtttggctgaagcgatcatttctttttcaatcgccttggtcactttcttggcaatcttgggactgtttttcgtatccgccacagcgaacctcctcttcccttataagggataatgtttacttaaatatttagcgaccgcgtctctgagaaaatcagggaacacgatctcggtctcgccaacaatctcaattgttggaaagaatggaatgaatagataatgatcgacggtcgtcaacgtatagctggcttctggatcaatttcttgcccatgccaaaagacgcgccgcaatttcatatcaaccgctatcccgtcataaacgatgtctccaaagattttaccacggaaactcatccctttaataggaaacttgcgtaaaaagagccggtttttctccatttcaagcaccatccgccacaaatcataccctttgagcgtcactttaatcagatgcattggatgcggtaattgagtttgcaaatcatctttagtaacaatcccagcctgcaaatcttgcaagaacaagccagtattcaatacggcagcttcagtgctggtcgcttcttcaattgcctttaaaccggtcgtcatcatttctgattcaccaattgcgttgattttaaaagcgtgtggcaacttggcaacatgctcggcggctaattgtgcgtgcccctttttcaggtagccttcaatttctgctgcgtcagtcttcacaactggtaagtccgcggttaaaaccgtccgagcacttttatgcatcacatggtgctgatcatccagttcaagcgtgatatcaccaaggtaatgaccgtacttctcggcagccgtcaataaggtttgattaaccagcagcccctcttctaaaagatgatgcgtgtgcgcaccacagacgacatcaatctcagggaattgttccgccagccacttatcagtcgtaatcccaagatgtgataggacgattaagatgtcatattgaccttcaatcgccgctaattgccgcggcaactcttcactgacagtcgtcggttcccaaccattcggccgataagttaagaaaaatggtgcggtcaaggcaataattgctacccgcgttccagcatcggtcgtcattagtcggtaagattgcgcaaatgctggcctttcgtttgttgcttgttcatacagattagccagtaataccgggaaattcgccttatcatacaaatgttccagatcagcatgactattaccgattccttcattgtttccaatcgttactccgtcatacccaatttgattgagtaactcggtattaatctgaccattcgttgcttcagtcaatggatgactacgatccattgcatccccgatgtcgaaggtcaagaccgtatccccttgctttcggtatgctgcttgatgttctaagaggaagcgccgcattctgggccaattttcaaaatgtgaatgtaagtcattcgtgtgtaaaatatgaattgtttccattttgcttactcccttcagctagtcgtggctggggtttgccagcgcggcttgtttgcgttcaaaaatgatttcaatctcatttgccgcaaggggtgttccaaacggcacccgttcaggtaataattcgcgctctggtgcatcaatcccgacattgatattctctgcaatcggcaacatataatgatgaatatgtccgtgcaagttgaacgtctgttggacctttcccaataataacggatagtgggttaaaaaatactgatggtgattgatcttaattagctcaccgacatcagcaaattgataatgcgccttgccagctgataatcccgcatcatgtttcgccaaatatttcaaaaaagcacggttatcatgattacctttaataataatcagctgcccattcaactgctctaacacagcagcgacttcagcaaaagcactcggcttattgggcaccattgcgacgtcacccaacaaataaacctggtcgtcagcttgcacccgttgattccagttagcaataatcgttgcattcatcgtagctacatctttaaacggacgcggcgcaaaatcattattacctaataattcggcgtgaaaaaaatgcgtatccgctgtgaaataagtcattcacaatcccacctaaccaatatgatttgcttttaaaatctcctgaaaggcttgcgcaactgcgccgtcttctttttcccattcttcccagtggtcaaaatcaaccgcaggcattgtgtaacgttcattaatgtaagcttcgtaagtttggaccgcattcgaatgcggaatgttgagttgtaaaatccggacttgcttaataaatccccggttagccgctagttcggcacgcccattcataaagatgttagccaattcataatacgttgtgccatctaagcgcgtaatttcttcaataatatcaaatgtttggtacttctccgccattgtgttacttcctattctaatccgatttcagttacgtttattctaccaatatgtacacaaaaaaaccactacccgcagatagtggttggcataagagagaaagagaattgataaaaaggtaattgcataagtaccttacaaacataatataccgcctaatgtaagcgttgtcaattgttatttttaatttatttatccgtttctttaaagttctgtaacaatcgtaggcatttgaaaggaataatggtatcttaaaaagagtagtttttatcaattgaggaggccattgatttgtcacagcaacattcacgatgggggcttttagtattaacaagcctttgtttctggtttttaaccggttttaccgttgtcgctcatcgtggcgaccccatcaacgcacccgaagaaacatttcaaagtattgacatggccttttcgcaaggcgctaactatgtcgaactcgatttacacgaatctcaagatggcgtcttagtcatctcccacgaccgtaacttacaacgcgtcacggggaccgatgcgattgtttcgcaaaatacttttgccaagctcagtgaactcaaaatgagtaacggggaaccaccacacagcgtcgatcaattatttgagcactatcaaaacaacccaaatgcgaaattcctcatcgaaaccaagaaaaccaaaaagggaaatccgcaggacatggaagcaaaactcgtggcgctgattcaacaatatcacatgcaagaccgcgttatggtccattccttttccctcgctagtctgcaaaacatgcaacgtttaatgccagagattccccgcatttttatcgttggcagtttacagcggatctcattcgagagttttaaatacgccgacgggattaacatctcatcatccctcgtcaccccaaccatcattaaacagctccattatctccatcaaaaagtgtatgtctggaatgagatgtctgaaaaccaagcgacttggaactggttagtcaacctaaatgtcgacggcgtggtcacgaactatccggcactgggacgccactatcaggccgcacaggatcaagcagaaagtgaagccatcgacacaattgggcaagtcaatgacgttcaagacctccccaccgttgaaaatccatatgaaccaaccctcaataaaaagccggctaaagcgggccatatctacaacatcaccgaagccgttacaattgccgatcaaacttactaccgcattggcactaaccgctttgtcctcagcgacagcatcaacgtcggtgaaacagcgaaagccgctgctttattggtgggtaaaacggcgcagattaaaccaactgcgaacattgtcgctacttggaataatccgctacaccccacccagacaaccggttatcttagtgccaattcacaacagcaaattttaggagtgcgctatgttggtaatcaagtctggttgaaagtcgctagtggttggttcaagagtcgccaagcattaatcgacttcaacccaaaccaatcgctgatggtaacccacttttaccgtgaaattccccaacaattgcggccaaccaacttactgattaacccagcactgccactgcaattgccccaacaaccaccagtcgacacacaactgtttaaccagtttgcccgttctctacaactaactaccattaaattctaacgaggtcaccttttatgacatccgattatgaacaattgattcgttccgtccaaaatactcttccaaaggaagaaacacttgatcacatctcaattctttttaaaatactaggcgataaaacacgcgctaaaatcttgtacgccctctttcaatccgaattgcgggtgagcgatattgtcagtgtgttagagatgtcgcaatcctcaatttcacatcaattacgtgcactcaagcaagcgaaactggtaaaaagtcgtaaagaaggcaaggaagttttctattcattagctgacaaccatgtcatcaatatcttttcgcaagttatcgcccacgtcaacgaacactaaggatcctattgacaccgatcaaattcactttggtcggtgctttttttaatgtcccaaacccatcatctcgattgcattctatcgtgtttggtggtatcttatagtcaacatatgaatatatgctcatatgtttgtttatttagtaaagattacgatttagcttttcactcaacaaggaggcctaaataacatggcacaacttcaattaaccggcatcgattgtgccgcatgtgctactaaaattgaaaagaacgttaacaagatggccaacgttaaaagttgctccgtcaatttcaccactcaaaaattaaactatgaactgaccggccaagaagctgttacggaattcgaacaacaactcgctactcttttgccaaccattgaaccagatgtggggattcaacaatcaccaaccccagaaccatcccccgcaaaacatgcgattaattatgatctcatccgaattctcgtcagctctttaggcttggcgatttcttatcttgtccctctaagcgcgccagctaaaaccacgttgctcctagctgcctttgtagtcatcggctacgatatcgtctggaccgcaatcaaaaatattctccacggcgaatggttcgatgagcatttcttaatgtcaattgcaaccattggggcctttggaatcggacaatatgccgaagccgttggtgtcatgttattctatcaagttggtgaatatttccaatcattagcggttaatcattcccggcgctcaattgctaacttagtggcaattaaaccaaccatcgccaatcggttagcggctgatggcaccaccgaagttgttgcacccgaagcaattcaggttggcgaacacatcgtggtgaaaccaggggaaaaagtcccgctcgacggtgtgattactaccggcgacagttacgtggacacctcagctattaccggtgaatctgttcctcgcgcctttcatcctggtgatgaactactcagtgggacgattaaccaatcaggtttattaacgcttgaagtcacgaaaccttatgctgattcaaccatcgctaagattttagaccttgtcgaaaatgcaagcagtcaaaaagcgcctactgaaaacttcatcacgcggtttgccaaagtctacacaccaattgttgtcggcattgcagccatcatggccattgtaccgccccttttattcggtgctccatttggcgattggctctatcgggcattgattttcttagtgatttcttgtccatgtgccctcgtcatttcaattccactcggctttttcgctgggattggaacggcttctaaaaacggcatcctggttaaagggagtaattatctcgaagctttaaacgatgtccaaaccgttgttttcgacaagactgggacattgacccaaggtagtttcagcgtcaccaccgttcattcggtcgatcaacaacctgatgaacttttagcactagctgcccttgtcgaacaacactcgacccatccaattggtcaatcgattttagcagctaaccaaacgccactcacaaagacgttatctgacgtccaagaaaccgctggtcacgggattagcgggcaactcaacggacaacttttacaagctggtaaggctagttggttacaagccagtggcatcgcaacactcacacctagtgaagtgggcaccagtgtccatgttgcttacaacaaccgctacttggggtatatcgtcattgcggacaccgtcaaaccagatgcacaaacggctgtcgcgcagctaaaacacgccgggattcatcaaacaattatgttgactggcgataaccaacccgttgcgcaacaagtcagcgccgtcttaggtatcgataagtatcaaagcgaacttctgccgcaagataaagtggccgccgtcgccaaacttacagaagaccgcgctaccaacggaaaaatcgtctttgttggtgacggaatcaacgacacacccgttttagcccgtgccgacgtgggcgttgctatgggcgggttaggttctgacgccgctattgaagctgccgatatcgtcttgatgtccgatgaaccgacaaaattagcaactgcgatttcgatcgccaagtacacccgccgcatcgtttggcaaaacatcattttcgcattagtggtcaaaggcatcttcttattattaggcgcctttggaattgccacaatgtgggaagccgttttcgccgatgtcggggtaacgttaatcgcgattttaaacgcacttcggattttaaagaagcactaaccttaaagggttcatggagactttgtgaaccttttattttttaatggcaagcgctttttaaatttgtaataatatgctaaaatgtgaatagattaataattaattaaccgttttttggttaaaatttaacaatgaaagctgggactgcaatgacattgaattggcaacaagaagcagcaaagtataaggatcaaatgcttgctgacttaacaagtttactcaagattaatagtgcgcgcgacgttgaccataaagaagacgacgcaccacttggccctggcccccgcgatgccttgctacaattcttagcaatcgctgaccgcgacggttttacaacaaagaatgttgaaaacgttgcaggtcgcattgaactcggtagtggcgacgaaatattcgggattttaggtcatatggacgttgtgcctgccggtgacggttgggaaacaaacccatttgaaccagtgatcaaagacggtaagatttatgcccgcggttcatcagatgataaggggccttcaatcgcagcatattatgctttgaaattattaaaagacaacggtatcgaattaaacaaaaaagtgcactttatcgttgggactgacgaagaaagtgaatgggttgggatcaaccgttacctcgaagttgaaccaaaacctgactttgcaatttcgccagatgcaaacttcccaatcatcaatggtgaaaaagggattgtgtcatacctcatgactttcaaaccagttgacggtgctgatggcgatatgacattggttagcttcaaatctggtttacgcgccaacatggtgccacaaacagctaaagccatcttaacgggtgcaatgccagctgatttccaagctaagtttgacgcctatgttgccgaccacaagttacaagggacaatcacaactgacggtgaccaaacaatcatcgacttaatcggtaaaggttcacatgctcaagaaccaaaagccggcgtaaatgctgcaacacacttggcaactttcttagctgactttgccttagatactaaaggtggcaactacatcggaacaattgcccgcttaatgcacgaagattcacgtgggcacctcttaaacatcaaccacacagatgatgtgatgggcgacttaacagcatgtcctgcagtcttcaactacacacaagatggtgtagcaacagtgctcttgaacgtccgttatcctaaaggtgtgactgctgaaagcacacgcgacggtttagcaaacacacttagtgatcttgctgacgtaacaattgacggtcatgcacaagaaccacattacgtgcctggtgacgatccattggttgcaacattattaagcgtcttcgaagaacaaactggtcttaaaggtcacgaacaagttatcggtggtggcacatatggtcgtatcttagaacgtggtgttgctttcggtgccttaccagaagaacgcgaaaatgtgatgcatcaagcaaatgaatatatgcacattgaagatatcatgaatgccattgcaatctatgcagatgcaatttacagattaacaaggtagagtgtgacgtaagtcgggtatccaccgaggattaatacaaagttgtgaatgattgcgtagcaatcgtttgcggctcagggttaaccggaaggatatggctgatagaacacatttagcaatcaaaaaaacggtccaaagcttaatcgctttggaccgtttttttgattgccttcatttatcagcaggcatcagcttaaacgttgaatgcccatctttgacaattgcgtataagatttgttgctttgtttcatcgaagtaaccgagattaacagccatttcgtcatcaatctcttcaattccctcaaaatgttcccgaattatcgaacgaacaaccttcatgttatccatgtgtttttgaattttctgtacagcaacccctagcgtgtagccttcatctaagaaatgcttgataaagatcgccttaatcattgtttgcgcgtcgtactcgcgggccttattgccatccaattcacgcgctttaatgtatcctttttgctcccagtagcggagttgacgcggtgtaacccccgccattttacaaacttcactaatcccaaaaatcaatcgatccgtatctattaactttaaaaaaaggtctttttgcaagtccccactccattcctattattatttttcattatagataatctattgggattgtcaagttaaataacacatttgtcaacttacttgacaaagataccaaatgcgtctaaactaataaatcgcatcaacaaaaacacacaaaggagatttttatcttgtcagacgctagaccattagatattcatgggaaaccatataatcggacagtcttagtcttggtcttattgattggtactttctgtaccgtcttgaaccagacgattttatcaactgctttccccacattaatgaaagcattcgatgtgtccacctcagccgttcaatggctcacaaccggtttcttactagtcaacgggattatgatccccattagtgcttggttaattaaccgattcaattcaaaagtcctctacatgtcagcaatgactgtcttcttaatcgggactattatctgttacatcgcaccaacgagctcgtttgcaactctattaatcggccggcttgttcaagctgctggtgttgggatttcaatgcccattttgcaaaccattatgctcaccatcttcccacctgaaaaacggggaacagccatggggatggccgggattgttatcggcctggcacctgctttagggcctaccctttcaggctggattatcgattcatacaactggcgtgttttattcggcatgattattccaatcgtgattctcgtcttagtcctcgctagtttccaaatgaagagtgttattcaactttcaaaacctaaaattgatgtcccttcaattattttatcaactgtcggcttcgggagcttgctttatggcttctcagaagttggcgataaaggctggggcgatgcgctcgttctcacaaccttagcaattggcgttgtggtaattgctttattcatctggcgccaactcacgatggaaaacccattcttggaactccgcgttttcaaatcacctgtcttcacaattgctgctattttaagtggtgtgacgaacatggcgatggtcggtgccgaaatggtcttgccactatacattcaaaacattcgtggcgaatctgccttccattcaggcttaacgttattagctggttccctcatgatggggattatgatgccaattacgggccgtatttttgataaatatggtgccaaacgcttagcaatgaccgggatgttcttattgatggctgcaactgcgccattcatcttcctaacagctactaccccaatcatctacatcgttgtgttatacgctgtccggatgtttgggatttcaatggtgatgatgcctgtcacaacttccggaatgaacgctttaccaatgaacttgattagtcatgggacagctgttaataatactttccgccaagttgccagctcaatcgggacagccatcttaatcagtgtgctttctagtgttacaaaaggcaatatgccaagcacacacatggtcaagacattaccattggccttccgcgataagatgattgatgccaccctttctggttatcacgcagccttcatcgttgctgtgattttctgtgtgattggcttcatcatcacattcttcctctcttcaaagaaatctacgattaatgggggtgccaaggcatgatcgtcattacactcgttatcagcacactcgcattattcttttcatcgattttcggtcaaaagatgtggcgaccaatcttaatgaccatctttggactcacatttatcgcttcactcgttttcatcgtccaaaatgatcacaatcattacggaatgaaaactgtgaccgaaactaagacgcacacgctcgtttcaagcgcagacgcgaagggcatgtcaatgcttctctatcacccacttggtaacggcactgaaaaagtctatctttatcggaccgatgccaaccaaagtaaacccaaagcaacccaaactgaaaagacaaccaacagtgttcaaaaaaatgctgataaagcagtcttagtgacaaccaccaaataccgcgtttatcaaaataatacggctaaattctggttcggaatttctggtaacgaccacgaattcgtaagtcgtcacaacacatttaaggttgctaaaggctggttcgttctaagtgatgttcaagctaaacaactcgctaaaacattaaaaggtcaacaagaacaacttaaaactggcgcagaaaatgccggtaaacaagctgtgatggctgctatgcaagccaatccagcaatgactgctgatcaacaacaagcggttgctaaaaaagcagcaatcgcctatcaacaagccgcaatggctaaagtgatggcaacattgaaataatgcaatcaaaaaatcccccacatcgtgatttgatgtaggggatttttttgtggtggaaatgtgctccgtcatccatatccttgcggttaaccctgaatgtcaaacgattgctgacgcaatcattcgccatcctgtgttaatcctcgggatatacccggctggctacgcactctgttttgaaacgggctttttgaaacatcttcctgcgcttaaccaaatttggcaaatcgacgatttcatcgtcaattcgtcaaatccagttaatgctcagaagatacccgtttcaaacgcactcttattttgaaacgggctccatcaggcatactcttccggttagttacatatcgaaaacgatcggctttgccgctcattcacgatatgccactaatcctcagagcataaccgcctgctgtcgcactctatttgcttaacaagcttgctgctgcttcgtctacgatgattgtcacgtcgtcgtgtagttgtaatgcacttgctgggacgtctgttgtttgtgggccttctactgtgcctttgatggcttcagcttttgatttgccatatgcgaacaagacgattttcttagcttttaagattgagccaatccccattgagattgcttttgttggtacatctgcttcattttcgaagaaacgtgcgttagctttgattgttgattctgttaattgcacttcttgtgtattgctgtcaaacgcagtaccgggttcattgaagccgatgtgaccgttttggccgatccctaagatttggatatcaactgggttatcagcaatcacttggtcatagcgttttaattcagcagaaatgtcgcttgctaagccgtttggtaagtatgatttagtaaatggtttcttgtcgaataagttcttcttcatgaaatagtggtaactttggtcgtcatcagctgataagccaacatattcgtccaagttcacggatgtgcaacctgtgaaatctaagtcgctagccactaatgtttcgtagaatttaattggtgaactaccagttgccaaaccgaatactttagcgttgtttgctaaaccttctttgaagatttcaaagcttttttggccgccttctacttgatctttcactttaataattttcatcatgattatctcctcatcatttaaaaattcaagtcgttcattggtatagtccaattataaacggctaaaatttcaattgcaagccttttgacgctaaaaaacgcgctaaataattggtatacctaacgtttagcgttttcacggcatttcgttaaaagcttacttttaatcgctagcaaacgcccccctttttgtgtctgctgattcaaatttgttaaccaattgcactatattcattgattgccgtgcatttctggatatttttcatttgtcttacaaatccgaaatcgggtatgataatgcgctgaactattatataatatgggacagtatgagaaaaaaggtggcgttattatttgaatgatccaaagcaccgttccagtcgatggcgagcactgctccagtcgagcagacaaaaggtctcaacgctattgacatctgctaaagacagactcgcacatttgctccatttacccgataaacgttctgcacaaccaactaaggaacaaaaaagagcctacatccaagagttgagccaatcaccactctcttttaagattaacgtcttctttgaagccattaagagtatctttctctatgggatctcaattagcttaatctgtatggcgctcgctgctggaattggcgcgggctattttgctgcgttaatgaaatccgaaccaattcctagttatcaagtgctaaagcaacaacttgataataccgatcaagcagccggtttatactttgccaagaacaataagttcggcgcaatcaaaaccgacttaattcggactcccatcaacatccatgagatgtccccttatctaaaggatgcgattgttgcaaccgaagatgaggatttctataaacacgatggggttgtccccaaagcactcttgcgggccgttatttccgatgtcactgggtttggttcacaaaccggtggctcgactttaacgcaacaattgattaagatgcaggttttaacctcccaagtaacctttaaacggaaagcaaccgaagtcttgctcgccttgcgggtcgataagtatttcactaaaaaagaaatcttacaagactacttaaacgttgccactcttggccgtaacaataaaggacaaaatatcgctggtgttcaagaagcagcattgggcctattcggcaaaaatgctaaggatctttctctagccgaggctgcctacattgctggtctgccacagagtccttccgtctatacaccatatgatcaagacggcacccttaaagatcctgaatacttaaaatatggtctagatcgtaaaaataccgtgttattccggatgtatcgtgacgatcgcattacaaaggctgaatacaaagccgctaagaaagtcgacttaaccaaagaattccaaccaaaagccgatccagccgaaacaacgaagagttatggctatgtttataacttacttgaaacacaagcaactgatattatggccaaacagttagccaaagaagccaatgtttcaactgccaaacttaacaaagatccaaatctctacaaacaatatgaaacacaagcaactgaattactcagcactaaaggctatcaaattcacagtactatcgatcaagaaatttacgatgccatgcaaggggttgttcaccaacagggcgcaacattcggacggacttataccgataccgttactgacgaagaaacggggttacaaaagaccgtttcgtcccctgttcaaaacgggagcgtcttgttagataaccgcactgggaaagtgatttcttttgtcggcggacgtgatttctcactcaaacaaacaaactacatgttgaccaaacgttctcctggttcaactatcaagccattgttagtctatggtccagcaatcgatcagaaactgattggttctaaaacgatgttggccgatttcaagaccaacttcaaggattacgcaccaaccgattacggtggcacgatccagaacaaattcattccagctgacgaagcgttagcccagtcattgaatattccaaccgttaacctttataacgctttgaagaacacaacagatccttctaagtacatgagtaagatgggcatcaacctcaccgctgatgaatacagtcaactggggatttcacttggtgggaccagtgatggggtcagcgtcttagaacaggccagtgcattttcaaccttcgcggatcaaggtgaacataccgacgcctacgtgattgaaaagattacggatcccgccggtaatgtcgtttaccaacatcacgctaagaagaaacgcgtcttttcaaaagcaacgtcgtacatcatgaaccaaatgttagccggcgttttaacagatgggactgctacttcaatttacgatcaactctactttaataccaacaacttagttgggaaaaccgggacttcaaatgataaccgcgatatctggtttatcgggagtacccctgggatcaccctcgcttcatggatgggttatgacagtactggtcgtaacttaactgacaactcaagccagattaatgaaagatactggtcaaaattggccaacagcgtttatcagatcaacccaagcctcatgcgtttggaagatgatcatgaaaagccaagtacggtcacaagcagcaaagtcttgaaattaactggtcaattacctggcacggtttcaatcaacggcagctcacagaacttgaacggttcaaccgtcacctcgctttataacaactggacgccaaaagcaactagctatgaattcgggattggcggttctgcccggaactacgaaactttctggaaccactatttaggttataacaacggctatggttcaattacctatagcaccgctgatgaattaaatccaactagtggctacagtagtcgtcgcagtggcaccgcagcaacaacgacaaataattacacagcaaacacaactggtactgctgctacgactggcactacaaccggtacgaattatacagcgaataccaatccaacagatacagagacaacgaactaaactaaaaaaaggcctcagttctaacgatttaaaatcgtttggaactgaggccttttttgattggtggaaacgtgctcttgtttgcaacaacttccgcttaatctaaaaatcccgttaatcctaaaacctggattaacgggatttttttattaatgctcaattgctgaccgcaaccaatagcactctattttgttgattctcttgctacgatactgtatggcaataggattgtcttgtcgtttacgtcttctttgttcatcatctttgttaaaagccgcattgctacggcacccatatcatacaatggttgtgagattgacgtcatcttaggacgtaccatttcagttaacttcgtgttgttacttgtcacaacttcgaattcagctgggatttgaacgccggcatcaactgccccgttcaagacaccaactgccaattcgtcatcactgacaacagcagctgttgccccagttgctttgattttgctgaacaatgcttcaccagcactgtagctgtattctgtttcaaaaattaaactttcgtcataagcaatgcctgcttcattcaaggcatccttgtaaccgcataaacgatacttgctgttaattgggaatttcaagctaccacaaacgaacgccactttgtcatgaccatttttgattaacttcaaagttgcatctttaacagcggcaacgtaatcgatgttaacactacccacttgttcgtctggatcaattgaaccagctaacacgattggtgtctttgaacgtgagaattcagcgcggatttcgtctgaaatactgtggcccatgtagattaaaccgtcaacttgttttgccaataaggtattcaacacttgaacttccttttggttgttttcatctgagttagccaaaataatgttgtacttgtacattgtcgcaacatcgtcaatcccacgagcaagtgatgcaaaatagatgtcactaacgtcgggaatgatgaccccaaccgttgttgtcttcttgcttgctaatccacgggccaccgcatttggacggtagtcaagacggttaataacttcaagaaccttcttacgtgttgcgggtttcacattcgggttaccattgacaactcgtgagacagttgccattgaaacgtcggcttcgcgcgcaacgtcataaattgtaattgtttgtttttccatgattaaatgattcctttcatttgtaaaataaaatagattatattttcagcagttttcattttacttcttgattaatttaacagagatttaaagcaaatgcaagcggtttacactaattttcatgaaatttacatttttgttttcatttgtggtttacattaccgtttacattggttgtgatatactagtgatatcaattgtaaaggaagtgctttagatgaataatcaattagcccaattacaaaattggcttggtgagaataatatggatgtggcttacatcagtaatccaaccaacatcctctatttcactggtttcgaaagtgatcctgcagaacgggtcttagccctctttgtttttgcagatcaggacccattcctatttacaccacaattagaagttgaatctgctaaaaaagctggctggaaactcgacgtttacggctatctcgatcacgaagatccatacgcaatcatcgcagatcaaatcaagaaacggaatgcgaaccctacacgttgggcacttgaaaaagacgaccttcctgttcaacgttacgaagctattctaaagcaattcccagacgcaacattcccaggcgacgcttcacgtttcatggaaaacttaaaattaattaaaacacctgaagaaatcgctttaatggaagcagccggccgtgaagccgattatgctttcgaagttggtttcaatgccttaaaagcaggtaaaacagaacaagatatcgttgcagaaatcgaatacgcattaatgcgcaaaggcgttatgcatatgagttttgataccatcgtacaatcaggtatcaacgcagctaacccccatggtggccccgaagccaacattttaaccccagatgccctcgtgctctttgaccttgggacattgcataagggttacatgagtgatgcgacgcggaccgttgcttttggcaaacctgatgcgaaatcactcgaaatccacaaagtctgtcttgaagcaaacttaactgcccaagcagcaatcaaacccggtatcacagcggctgaattagataagattgcacgtgacgtcatcactaaagcgggctacggcgaatacttcatccaccgtctaggtcacggcattggaacttcagaacacgaattcccatcaatcatggaaggcaacgacatgattatcaagccaggcatgtgtttctcaatcgaaccaggaatctacatcccaggcgttgccggtgttcgaattgaagactgtgtccacgtaacagaaacaggatcagaagccttcacacacatgacaaaagaactacaaacattctaagagtgctgattcaaacgggttggctttgaggattaacttaaaaacgcggattatgacgcttttcgtcatgattcgcgtttttggttaaccggaaaaggcagtttgaaacagcacgtttcaataagagtgcccttaattgcggtcagcaactgagcactaattaaaaaaggcagacgaaatcacaaaatgatttcgcctgccttttgttttaaatttaattaacgtgtaatcatccgcatccacattatcaatcaatggtgacatgccacctgttgctaataaagtgaggcgatgcatcgctctcgaacagatcgtgtagagcaattgccgttgatcttcatgattgtagttggttgcactgacttgccagccgataatcgcatcgaattccaaccctttggctaagaaacttggaacgactaacgtacccgctgccaaacgttgattttcggaacgaattaaagtgacttttgtgccactggctttcaacttagctgttagttcttgggcttgcaccaatgtcttggtgataatcgccgtcgttaacttatctgcttcatttttagcgagttgcgcattcacatcagcgaccaattgatcttcgctttgacgcacaatcaagtttggcttgtcgccttcacggttgaaagcttcaattttttgaccgccctttaagagccctttggtaaagtcggtgacttgttcagttgaccgatatgaacgcgtcaattgaacgaccttcgtattttgcgcatcaaagagttgttgcacttgttgtaataggttcgtgctgttttctttggtgaaaatcgcttggttcaaatcaccgagtaacgtgaagcgcgccttagggaagtgcatcttcaagaaggccaattcgtatggtgtgtaatcttggatttcatcgataaagacaaagcgcatgtcgcgttcgccgtgcttaccggtcattaaatcataaagatgcaagtaaggtgtcacatctgataacgtcatttgtttggcctttaaattagcgacaaaatcagtcacatgatcattccagatttctggtgtcagatcaaattcagccaaatcaaccaattgcggcacaacccgcatgaagtggacgtattgtgcttgaatactcaagaagcgattgcgttgaattcctttttgaacgggtttgaaagccttcaaaacgatttgcttagcgatatatttactttccgcttcaccagtcttaaagtccttacccgccataatttcgcggagttcctcatcacttaagttttcagcgcgttctgtcacccagtcagccttcgtttcatggtcgactttgtggctcaaactgcgcaataaactttccttcgtcgcgtctagccggtttcctaagtgatagttttcgttgaaacggtaatagacgtcgctgattttttccttactaatcaagaccttcccgttcactttcaagtcacggaagcgcatatcacctttttcaagatgcgctgcgtaacgtttaactgctttatagaagactaggctttctttcaaacggctaatccgcgcatcagtttccgtgattggtgtttcgaattggtcaaataaactctgaacagcaaggttcggcaaacgccgtgcaacatattgatagtaagtcatttgaatcatgttttgttcgccaagttcaggcaacacgtcagcgatataatcgttgaacaattggttcggcgagaacatgatcacttgactggaatccaggttaccccgataccggtaaagtaggaaggcaatccgttgtaaaatcgcggatgttttcccagaaccagcggccccttgcacgaacaataagtccgcgtcagtgttccggatgatttgattttgttcccgttgaatggtcgtcacgatactcttcatttgtgtatcagacttttcgcccaatacttccagtaacatttggtcaccaattgtttcttgcgtatcaaataacgccttaatttggccatcttcaattaagaattgacgtttcaaagaaatattgacgtcttgcgggccgtcaggcgtttggtacgtaacttcaccagtcttcccttcatagtaaattgatgaaataggtgcccgccagtcataaatcaagaaatgatcttcgcgatcggtgaatgaccctagcccaatataaatggactcagactttggttcacccttttctttaaaatcaatccgcgcgaaataaggggttttttccattttttgtaaagtctcaagttgccgggaagattgttgccaagaattattccgttcttgcaacatttgccgttgttgttcgattgagactgccgtttcagtcattgctgaatcattattgaaattcaaccgtacatcattaaagaagtttgcgttaatttctttttcttctgatttagcccgttcaacggcgccttcgaagtgcttttcggcgtttttaattaaaccgacaatctcggttaaacggcgttgttctaatgatttttgttcgtcagtcaaagcagatgtcccccgatttctaaataaacagttctacaagtttaacactaaattcacaagagtgcgacgataggcgcttatattttgagcattaactggatttaccgaattggcgatgcaatcgtcggttcggtaaatttggttaagcgtagaaatatgcctatcggagcacgtttagagtgcgtttgaaacggtttaactttcgagcattagcctaatcagggaaataagcgatgtagtcgattgttttcctgatgtagctaagcggaaaaagttatttgctaaagcacgtttcacgatcttcctacaaaaaagccggccgctgcaaccaccagccctaacccgtaggttaatagcagataaccaaagaaaatatggtaacggcggcgaaaccacagctgactcaattcgctattgaacgttgagaaagtcgtgtagccacccaagaccccgacgcccaaaaagggcgtccacgtttgatccaattgtgccccggtcacccaacctaagcaaaagctccccgttaaattaattaaaaaggtgattaatggatattcgctggcaatctgcgttccaagacgggttaattgataccgcaaaatagcgccgattgccgcgcccaatccgacaattaataacgtcatcattttagcacctgcgactttccttgccgatcgagcagccaaactgcccagtaatctgccactaaacttaagcagacaccgccaatcaaactaatcccgatatacaggctaaatggccaccattgattggccaccaataacttcaatgcatccacgctaaaactagaaaaagtcgtgaaggctccgaaaaagcccgtgcccattgcaagtgccagcgtatcgctaatctgataacgaaccacgatgtaacgcattaaaaaaggaagacaaaacgccccgattaaattcacacacaaagtgccatacggaaaccccgctgcttggtgcaatccgagcccaattgcatagcgtaaaatcccgccaaaaaaggcaaaaattccaaccgcgagactttcttttatcttcattttagatcgcccccctttttaatatcgtagcatctattttacagaagttattaccaattgtaaattagttgtagatattaactagcgataatgccaactttttaataataatttaatcactaacgaattatcaacaaaatcgataatattagcgccaatatataaaaagccaattttacgaacccgtgctgttgctcggaagctattcggctttgacatgctttagtacccatctagctatcaaagccaacttcctgtgcacagctgtggcccgcaaacagtcggctacaccgcctatttacgaacccgtgctgttgctcggaagctattcggctttgacatgctttagtaggttagtgtatgctctacacaactttattgagcattgaaaggatcttttttatgacaagcttagcgctcgtaatcgttctattggcggctttaatgacgccgttactcatggcaaaatttaagatttcttatttaccaaccgccgttgcggaaattttggtcgggattttactcggacaaagtggcttccacctcatctcaaccacccccacactgacggaactttcatcattgggtgtgaccgtcttaattttcttaagcgggatggaaatcgactttgaactctttaaaaagcaacccaccacagctaaatctggcgttaaaacaccgctgacgcccttacaactggcagtcggtagttttacgctgatcctattaagttcgctaggactcgccagtttattggcatggagtgggttgttcaccgatattggactcgcaacaattctcttttcaaccatcgcgttaggggtcgtcatcgccgcgttgaaagaaaaagaactcctcagccagccgcttggccaaacaattctgttaattgccgtcctcggggaaatcgtcccgctgatttcgttaacaatttatgccgccctcaataatcctggttctaagagtctgtggttactatcactaattttcttagccgcgatcttcttattgatgcgttttaaaactgtttatcacttctttgagcggattgataagtcaacgactcaactcgatattcgtttagcctttttcttaatcatcacacttgtatcgattgccgaagaagtcggtgccgaaagtattttgggcgctttcttagccggcatggtcatgaaacttttacgcccccgtgaagagacgcaagataaattaacatcaatcggctacggctttttcattcccatcttcttcattatgaccggtgcaaaactcaacatccccgcgctcttacgtgatcctaaatcactgaccctgattccctttttcttcatcagtttcatgggcgccaaagttttgatttacttcgtcttaaaacggcgcttcaaagtcaccaacgccctcgccgggactttcctcagttcgacgaccatcacgttggtcttacccattttgacggtcggtctcaacttgaaggttatcacgacacagcaatccggcgctttcacaattgcagcggtgattagctgtattcttggtccgattctgttcaatcgattctacttaccaacgcctgaagagatgccacgcaaacgtgttaacttcatcggcgccaacatcatgacaattccaatcgcccaacagttatccaaaggtctgtacacaagcgaattatttaccaataacgaacaaaattatcaaatctaccatagccaagccaacctcgaactcttgcctgacttggcaccagccaccttaactgacgcggccgtcttcgatacagatatcctggtcttaggctatttaaataatgagcaaaattatcaacttgcccaacaagcgattcaggccaaagtaccgcggatcatcgcccgctttgaatttaagaatatctcggacgatcaatacgatgaacttaaagaacatggcgttgaaatttttaacacttacgaagcaaatatcagtctgttgcgaagtttaatcgagactccatctaccttacaaatcattgataacactgatgccgggctcttcgaagtcacggttaaaaatcggcgcttcaccgggattcaactttctaatctcccatttgtggaccaagtcacaattagtcgaatttaccgcgataagcaactgatcatgccgcatggtgacacgcaaatccatctcaatgatcacctcattctaacggggaataaacaggctgttcctgccattcgacgccaattagaaacgctcaactaaatcatgttgaccctcgcacattctctctaataggtttataatgaaactatcataattaaaggatggtgcagatatgaaacaaggaacaacaatcctcacattggataatggttaccatttatggactaatacgcaaggaacaggcgacattcatttactctgcttacacggtggccctggtggtaatcacgaatactgggaaaacttcggtaaggaattagctgatcttggtgtacaagtacacatgtacgaccaacttggttcattttattctgatcaacctgattactcacaaccaggcaatgaccaattattaacatatgattacttcttagatgaagttgaagaagtccgtcaaaaactgggcatcgacaacttctacttaatcggccaatcatggggtggcgcattggtccaaatgtacgctgctaaatatggccaacacttaaaaggtgccatcatctcgagtatggtcgatgaaattgacgaatatgtcacaaacatcaacaaaattcgtgaagacatcatgacccctgaacaattgaaattcatgcaagactgtgaagctaagaatgattacgacaacgatgaataccaagcacttgttgacaagttaaacgctggttacgttgatcgcaaacaaccacttgcaatctcacatttaatcccaacaatggcaaccgacgtttatggcgtcttccaaggtgataatgaattcgttgtgactgggaaattaaaggattggcatttccgtgaccaactccacaagattactgtcccaacgttaatcacatttggtgaacacgaaaccatgccaatcgcaaccgctaagatcatggctgaaaagattccccatgctcgcttagtgacaacgccaaatggtggtcaccatcacatgattgataacgcacccgtttacttcgatcacttgaagactttcatcaaagacgtagaaaatggcaactttaacgattaaataaaaaaagccgcgcacaaatttaaatttgtgcgcggctttttttgacctaatcaataatatctgaattaggttcccatttatccattgtatcgaataagtggtttgtttgtgcgaataattgagaaaggtctgcattgccgtcatctttaaaatgtttaaagaataagtagaaatcgacttccaattgatcaaccattcgtaatccttgctcattcaatgaaatgaatactttacgttggtccatttcatcactgcgatttttaacaattaagtgttttctgaataaaacattaattttacgtgaaattgctgggcctgaaagatcaaaggattccgataatttcgccacttcaatattggggtttaatttgacctctctgagaatcaaaaattgatcgtatgtcaagtcgtgcgtgacagttaaatgatttatcttattgtaaatttggccaatttgcagataccattcgttgaatcgatcaacaaggttactatccgtttctggttgcatcgaaccactcctttacataaacactaaatgtggttattaagtgttactagtcaaaaataacacaaaatgtataaaatcaaaaggtttatgcttaaaatattaataaatattgataaagttatttattagtatcttttaaaatttattctctattaatgataattgcaattgattataaatcaattgttattattaccattaaaaactataaatgtatgtaaccgttttgcaaaaaatatggaatgaccctgcacaccatttttatctatgctagaatgaaggtactaaaagctattgttggagggttacgatatgaaacgaatcacactttatttagtgcgtcacggtcaaacattctttaaccgttataaccggatgcaaggttggtcagactcaccacttactccgaaagggattgcagatgccgaacgcgctggcaaagaattagcgaaagttaattttgctcaagcttattctagtgaccgcagtcgcgcaatggacaccgctaaaattattctccataagaatttctaccttgatactccatatgctatcacaccgcacttccgcgaagaattctacggctattttgaaggtgaagattcacccaaagcgtggtccatggcaggtgccagtcatgatgccaaaaccttccaagaaatcatcaccaaatactcactcgatgcctctaaagatttcatgaaagaagctgatcccttccacgatgctgaagatgccgctgaatattgggcccgcgtcggtaaaggtttcaaacaacttcgtgctgaatgttctgacggtgataaagtcttgatggtcagtcatggcacaaccattcgcagtattgttggcaagtttggtaacgaccaattcgatgttaccgttagtccaatgaacggtagtattactaaagttattttaacagacgaaggcgttactgttgaaagttacaatcaattaacccttcaatagtatcaaaacgataattgatgtatgaatattcattgaatatagagctgggcaatattattctgattgttcagctttttttgtaggtaataattcatgccgttcaataataatacgcgcttcaaatgacagtttcggcagtcttctttggctttttttgtaggtaaaatgctcaccacaattgtagctaagcaagttaaaaactaatccagcgtggtatacgcctcttaatgacatcagtgtaacaagtagcgtctagagaaacaacttcgacctcatctaaaaaaagccccctttaatctcgaagttcagattaaagggggcttttttagactgattcctatgttttaaactgtttcaaccatctactatttaacttccttcaacacaattcctttgtagagccatgtagtgagcaagtagtagattgcgtagagaataatgaaaattgaaaatggaatccagagatcattatatggatcaatcataatcaatttgaacaattgaagaccaaagaggacatggatgacgccgacgatacctggtaagaggaataagaccccaatttctttggcaatggattgttgcaatagattgtgacgcgtcccgattttagccaacattgtgtagcgtttaacatcactagctgccccagataaaatcttgaacatcaagcaacttgctaacatcgctaagaatgcaatcccgaggaagaagcccataaattcgagcccactgaacatgctgttcgctagcttatagttagcatacttgctactatccattgtagccccttgacctttagccaattcaggatttgcaatcacttgttgtgcgtgaatttttttgataacgggtaaattaaccgcaaagtctttgacccgatatgttttaacttgcgtggttgcgcctgccacttgattaaattcagcgtcagagacgactttaacgtccttactagattgacttggcacttgaattgcgcgcaaggatgaagaatcgccgttttgaatctcactgagtttcaccggtttaaccccttttgcgcgggcgacaccattcccattaccaaactgaatggccatgattggtgacttttcaagttgtgctgtccgatagtagacagttttcgcatcttctttaacatcgtaattagcagtcgccttcacaccctttaaatcttttgtgaggcgcaatgcttcttggttcggttgatttaaaacaacgtcgtaaggcgccattgtttctgccatttctggaatttcactttgatagccaatcccaactgtgattgcgcctagtgccaatgcaaataacatcgccaccaatgcgagcatcttggtgtaatccttaatgcggaagctcaattgcgctaacgtaaaattatttaaaccacgattacgaatcttgctgttacgtttgagcaacgtaatcaaccagccgaaaagggcattaaacaagaagtacgtcccgagcacaattgtcactaatgccacaactaagcccataatttggaacgttgcgactttaatcatcatatagtaaccaacagctaagaaaagtaagcccaagacaatttgcacaatacggcttaatttattttgtgaaacgcgatttggttgttgatcatcgtgtaagagttgtaaaactggtgttttcaaaagttggaattgattaactaccgctgcaataatgaacaagataatgaagaaaatcaaagttactaacactgcaggtaagtaaaatggtgaaaaatgcttaatctgaatatccatttgagacaataacagattgctaacaatttgggttaatccgaccccgagcgccgttccaatgagagtagcagctgtcccaatcactaatgtttcagcagcaattagttgggcaattttgcggccttttgcgccgagcatcataaacatcccgtaatctcgacgccgcatgctcattaagaaattattcgcataaataatgtagactaatgtgataatccctaataaaacagacccgatttggaaaataatgcccgccatgctaattggcgagttactcgtaacgaaacttttgttagttgccagtgcttcgaacatgtaaaaaatggcacttgccataattagaccggaaaaaagcactaaatagtctttcaaacggcctttaatgccggttaatgataacttcaataacatatttagacttcctcctaatggttaaatgtgcctaatgtatctaaaatttcttgataaaaggcttcccgactcttatcgccgtgaacgagttcttggccgatttgaccatctttaataaacaagattcgttgacaataactagctgaaaatggatcatgcgttaccaataagattgaaacgcgttgttcttcgttcagctgagccattgtatccaataattccttggcactctttgaatcaagtgcacccgttggttcgtctccgaataaaatagctggattgtggactaaagcccgcgcagcggcgacccgttgtttttgaccacctgataattcggttggatatttgtttaataaactatcgattgataacgtcttggcgattgatgtgactaaatcgcggacttttttaccgccaacattttgtaacgtcaatggtaatgccatattttcataggccgttaagttttctaataagttgaagtcttggaacatgaacccaatttccttggcacgaaaatcagctaattcattccctttcaacccattaattgcttgcccgttaatttcaacttggccagcagtcggtttgtcaagggttgataaaatgttcaataaggtggttttccctgaaccagaagcccccatgatcccgacaaattcgccctgtttcacatcaaaagtaacgccttttaaggctgtgtattgtttttcgtttggtttaccgtatgtttttttaacgtctttgacgctaacgactgttggtgtgtccattaataatgcctccagattttatgataattctatcttacaagagattaaaacggcatgcgcgctttttagatgacattttaacgggctaaaataacaattttgtaagattattcccccgttctttaaaaatcaatgtgaaacagtcaaaaaagttttgtcttccctttctgatttgattataataaaaacattgtgaattttcagaaaaggggtttctttacgatggatgaaatagaaccaaaaaagaaatatattacctggcaagtccttgctttaatggattttgtgaccgtcattggatttgacgatattatttataactttcaaaaccaagggatggcagttgtcttctcatggattgtcttactattcgcctatgtcctcccttatgaattaatggttggtcacttaggctctgctttcagtaaagacggtggcggtctttccagttggatgcgccatacaagcggtgatgtttggggttacttaaccgcttggtgttactgggtagcgagtttgccatacttggtcgatgttgctaattcaatggtcgtttccttcttttggattattactgggaacggaaatcttgaagacaagctctcacgggcttcctttgcgcttttaacagccgcaattaccatcctcttcatcttcttccaacacaagtttacatcgtctctacaggtactcagtatcgttggtgggggggcgatgtttgtcatgaccatcctctttgtcctaatgacctttgttggtttattgaacggtggtcacgttgccacccatccattaaacgcacacaccttcattccaaaatttgatttacattacttctcaaccatcggcctcttaattttcgccatgaacggtgccgaacttgttgcaccatacgttggccaaatgaaagatggtaaaaaagattttccaaaagccatgatggccctcgctctaatgaccgccttcctaaccatcttcggctcattagcaatcggcgtcttcttcgatgccaaccacttaccagctgacttgaagatgaacggttcatactacgccttcttagcccttgggcaacaattccacatgggtaaagtcttactctacatcttcgctgttacccaagcgatttacatgggcgctcaattagcgatgctactcgatggcggcacacggattttcttatccgacactgccaaacaattcttaccaaaagcactgactaagaccaataaacaaggccttccaatcaacggttactggttgaccactgggatttgtgcctttgttttagcatctagtgcctttctgcccgagattaacgacatcttcaattggttgttaaatattaacggtatcgtctcaccatttgtaacttgtttcatctttgtcgccttcttacgggtccgtttcaatagtgaaaaattcccatcagaatacacatacattaaaaacaaaccatgggccatcatcgttggcttctggtgtttagccattacagcattaggaacgatcttcagtatcttcccacaagatgccacacctggcacagccaaatatacacatgaattaatcttaaacatcgtcgtctcagtcgccttaatgggcctcggcgtgattttaccactggttgcaaaattccaaagaaaacgagcagcctaactaaaaaagattcgcccatatggagcgaatctttttttattgccttggaaatgttaataaatcataaagccatctggttcaatgatggtcgctgctgtttgctgctgaaccccttcagacagaattggtgtcctcattgatgcaacactaacggctgtttgacctgcattaaaaacagccgtcaattgttgctcacctaatcgccgagtcatttttaagacgtcgggatgagtcggctcaattaaccactcaagctgtccttccgacaatagtttttgcttaccatggcgaagcccaattagctgcttaacgaactgatacatggcttgatcttggtccacgggatcccacaccatgcatttacgattagcaggatcgtccactcccgtcatgccatactcatctccataatagaggcatggcacacccggctgtagatacataaaagccatcgtttgacgcatcaagcgtcgattgtcattggccatcgttagcaaccgcggcgtatcgtgcgaatctaggatattaaactgcacctgattaatttgatcccggtacagcattaactgtcgattcagcttcgaaaccatttggtggagcggaatttttttatgaataaaataatccaaaatcgcatcagtgtaggcgtaattcatgactgcactaaactcgtcaccgctgagccaactctgcgctgaatgccaaatttcaccaagaatatagaaatcaggtttagcagcatcacacacctgtcggaactttttccaaaagtgatgatcaacttcattggcgacatctaaccgccaagcatcaatatcaaatgcttcgatccaataccgcgctatcgataacaaataagcttgcacctctggattagccgtatttaattttggcatgtgtggcgtcgtggcaaagacatcatatgtaatgtctgtagcatcttcgaaattccgacctggctgataacgcactggaaaatcccgaatatggaaccaatcagcataccttgaagccgcgccattttgaatcacatcttgccattgtggtgattgatcgccgagatggttgaagacagcatctagcatgaccttaatccctctttgatgacaagcagtaatcagctgccgtagcgtctcgtcattgccaaaatgtggatcaaccatccgataatcacgcgtatcatatttatgatttgaaggcgccatgaaaattggattgagatacaatccattaatccctaacgccaccaaatgatctaaatggtcaataaccccttgtaaatcaccgccatagaaatcttgagcctgtggtgcctcatttgtccacggtaatgttccatctggatcatttgtcggatcaccatttgcaaatcgttcaggaaaaacctgataccaaaccgtttgtttgacccactctggtaccttagcccgatcaatttcttggaaatagggcatccgaaaacaagcatctgttttaggtaagattggaccaggcccctgatcaccataaaaagtgctggtcccgtccacaccaatcacttgaaaagcataggctaatcggcggcgatcaatggtcagttcaatcgtccaaaaacaagcgagatccgttattaagccttgctgcatccgaatcgttttcggttgccaactgccatcgactaatatataaggatccccatacactaggtacactgcttcaacgtcattacttgccgtccgcaatcgtacccgtagcctatctggctgatataagaaagcaaactcactatctggtcgatgataaatcgctgctaaatccatttgtctcctccttaaaaaaaccagtccaacacacacccgaaggctcggttgcactgattaattagtgttgatactgttcaaaggcttgttctaacaaatcagccgttaacgccgccgttgtagggacaacaaccgccgctgctgataattcgctcgcatgaccaatcgcaaccgaaacagcgcctgcagcattaatggcggccacaccagctactgaatcttctaatccaacgcattttcgcggattaacagcaatcttctgagcagctgcgatgaagatatccggggctggtttaccttggtgcacgtcattcggattaacaatcgctgtaaaatatgctgataaagctaatcgatcaagaatgagtggcgcatttttgctagcagaagcaatgaccattggcaccccgcgcgcttttaatgctactaacaacggttgaatacccggtaaaatatcggcagccgttaattgcttgatagcagccacgtaattttcatttttttgagtcgccagtgctgcgagttgtgccaccgtatactggccatcaagttgggcaaaggccacaattcgttgcaaggatgcttcccgactaatcccttttaactcagcttcaaagctatctggtaagctgacgccaaacgcttgttgcgccaattgacgccacgccgcaaaatgaaatcgggctgtatccgtaataaccccatctaaatcgaataagacaccgtccataataacctcctattccaacatcatcgacgcatcattgacttgaattgccaaacgatcgcccttgagtagtttgatatcagttcggtcggccgtcacgctaattttcaacaaccggccgcggaagttaatatggaattcataagccgtccattttttgggtagaaatggtttgaatgataattgtccttcatcgctaattcgcatgcctgcaaaaccttgcacaatcgctaaccaactccccgtcatcgacgtaatgtgcaatccgtcatcggtatcattattgtaattatcgagatccaggcgtgccgtccgcgcgtacatttccaccgctttatcttcgtaatgcagatcagccgctagaatcgcatggaccgccgctgataaacttgattcatgaaccgtcaacgtttcatagaaatcaaaattacgcttcttttcagcagctgaaaaacgatccataaaataccaaatgccttgtagaacatcggcttgtttaatgtacggcgaacgcaaaatcttatcccatgaccaatgttggttgatgggccgttgatctgctgggattgcactgacaggctggatatctttatctaaaaagccatcttgttgaagaaagatcccgagttgttcatcttgtggcaggtacattttttcaataatcgcttgccattgtgagagttcttcatctgaaagtctcagatccgcttttttggtatcgcttacttttttgagcgtttcaatcgtataactaagcgtccattgcgccaataaattcgtataccagttattgttaatattgttttcatattcattaggccctgtcacaccgtggatcatataccgctgcgcacgttgtgagaaatggacacggtctgcccaaaagcgtgcaatctcagttaacacttcgataccttcattgagcaaataagtctcatcgccggtgtaacgtgtgtagttataaattgcataggcgattgtgccattgcgatggatttcttcaaatgtaatttcccattcattatggttctcaatcccattaaaggtcaccattggatagagcgcgccttttaacccctgttgccgggcattgtgttctgcacccgacaattgattatgccgatacttcaatagattcaacgacactttcggatcagccaatgagagataaagcggcattgcaaaaccttccgtgtcccagtaagttgcaccaccgtatttttcgccagtgaatcctttaggaccgatatttagacgctcatcttcaccataaaaggttgaaaaaagttgaaataaattaaagcgaatcccctgttgggcactatcatcaccgacaatcaccacgtccgccatctgccaccgtttcgcccattgattcgtctgtgccgctaataattgctggtaactttgttgcgcaacgacctgcttgatacgttgcatatttggtaccaagtccaactctgaataatctcgagaagtcaccactaccgctcgtttttcaaaattcaattgcgttttaggggccaattgctgtttaaaacgttgcccaacttggtgggcttcttgaagcccagtatctgccatcattgtcgtttgatgatcaatttgaacccccacactaaaccgtggtaccccgaaatcgttgggcattgtttttccgaccaaataagtgtcatccgcagcgtctgactgctcaatcacttgccagaattgctcaccgtaattcgcatcctcattttgaacatcagcatcgatcatagaactaatctcaatctcaactgcttcgctcgccaagttttcaacagtgtagcgcaatgcgcataattccttttgaacgatactaacaaaccgctctatcgtaacttgcacttgtttattatttttagtaacgatgaattggcgggttaacaccccattatgcatgtcgagtgccaatttaaatgcggtcacttcatctttgcctaaatccaccgcttgaccatcaattttaagattcgttttgatgaaattgatggcattgatcactttcccaaaatagtcaggataaccatttttccaccagccaacgacggttttatccggataccagacaccaccgagataaatgccaggcaggctgtctcctgaataatcctcttcgaatacgccgcgcatccccatgtaaccattaccgatactcgtcatactctcttgtagccgtttatgtttacgatctagttgatgcgtgacaatctgccacggatcgacttcaaaaattctctccatttcgttccctccgatacgtcagccaaaattattccgcctatttagcagcgcttaatagattgtttcttccgttgcgatgtcgaagtagtgcgctttagacatttcaagcgccatctcaacccgatcaccaggttcatgataatcccgcgaattaacttcagcgataaaatcggtttgtccaatctttgagtagagcattgtgttagcccctaataactcggaaacgacaacctctgccgttattttagcatctgggaatgtttggagggcaatttcttcagcgtgaatatcttccggccgaatccccaagatcacttgttgaccatcgtaaccaccggcaataagctgtttcaactgaccttctggcactgcgatatttagaccatcgtcattcactagatgcccattagttaaggttaccgtgaagaaattcgttgctggtgaaccgataaagcctgccacaaacttattaaccggatgattatagagttcagttggcttgccgacttgctggattttaccatcgttcatgatgacaatccgatcagccatcgtcatcgcttcaacttgatcatgcgtcacatagatgaaattacgacctaaacgttgatgtaattgcgcaatttcagtccgcatttgcacccgtaacttggcatccaagttcgataatggttcatccaataagaacaacttagcatcacgaacaattgctcgtcctaaagctactcgttgccgttgcccaccagaaagagaagatggcttccgatctaaatactccgataaacctaagatttctgctgcggcatcaacccgttttttggtatcttgcttatcattcttacgaatattaaggccaaacgccatgttatcgaagactgtcatatggggatagagcgcatagttttggaaaaccatcgagatatctcgatccttaggtgcaaccttgttcatcactcggtcgcccattttaaattccccatcagagatatcttctaaacctgcaatcattcgtaaagttgtcgatttaccacagcctgatggtccaacaaatacgatgaattcaccgtctgcaattttcaaattgaaatctgtgacagaattggtatcatttcctgaatattttttattgatatgatttaaattaatttcgaccatcgatcatttctcccttacttcgtttttaactggtgcaccgttcaataattgatagctaatgaaggctgccaacgaaacgctcgcaacaagaatcataaacgcgagttttaaaaagacattaatgcccatcaacaagatgaaaacgccggtggctagcactaatttgcccccattggcaatgataaagccgcctaaggtaacatcatggcgcgctaacccgaccaagtagcttctggcaacgacaactagcaataacgccccaaaccagaccaataagccgctacgaactaaaatatcgcctacactggcttttagtaacaacacgatgatcatcaatgccgtcgctaacgtcagattcactaaaaagtctggcagtgcctgccgccacccttttaacacaacgcgtgcataattaccatcaccgttaacttgccattggtccaccgctctaaaaaccgcgactaaacttggtagtgtaaacaaactgagcattaacactagcacaactgcacccggaatcattactcggccgtttggcatactaaacattaaaatcagtgtcagaatgacaggaaaattaattccaaaccaagcaaggttgatggtaaaaagcgaccataaccaattcccggctgccaataacgtttgtcttgtttcgctgtgctttttcacgattaacacttccttaattatttaacggcgccatctgtaacacctttgataatccatttttgagcgaataagtagaagacaatgaccggaataatcgacaaggtaatgccggctaatgcgaggtgccattgtttcgtgtattctccgaagaaattaaacatttgtagtggaatcgtatattgcgcttgtggtaagaccaatgatggtaaaagataatcgttccagatcgcaatgatgttcaaaatagcgaccgtcacagtcattggactcaacattggtaagatgatcttgtaataaatttgccaccgactggcaccttccatttcagccgcctcatccattgcaatcggaatacttgaaagggtgccttgatataggaaaatcgataaactacagttgaagcctaaatacatgaacatcaagccgtacatattcaacagatgcacattaccgaagtttgccgtcaacggaatcataactgattggaatggaatcaacatcgctgagatgaaaagcagcaataaactactactcaacttcgatttattccgttgcagtgcataggctgccattgaagaacagaggataatcagcaacacactgcagactgtaataatgagcgaattggtcaatgaactaatgaaattcaatgctttaaacgaatctccatagttcacattcgtgaatggattaggcagcgacaatactgaggcaaaaatgccttttggtgttttaaatgagttcgttagaatcatatagaatgggaataaccataaaagaccaatcaatacaccgaggacgccgatccaactatttcttttcttattcattagaaatcgccctcccgtttacggttataaaagacttgtactaaagaaatcgcagcgacaatcaagaagaagaccattgctttagcttcagcgagtgcgaaatcactcgaattataggctgtattcacaatatccatcgccaacatttgggtcgagttgtaaggtcccccgttggtcaacgacaagttttgatcgtagattttaaacccattcgacagagttaaaaacatacagacggtaaatgctggcgcgatcattgggaatgtaatccgcgtaaatcgttgccaagcagatgcaccatcaatttcagcagcttcaatcacttcacttggaatattttgcaagtaagcaatatagataatcatgatgtaaccactcatttgccaaaccgtcacaattaccaagccccaaaaaccggttagtgaattcgttaaccagttttggaaggcagtcatgtgtaaggcagatcccaaagcgctaaagccttgcgtgaaaatgaattgccagataaatcctaagattaacccaccaatcatgtttggcataaagaagatcgctcgtaagaaattgttgcctttaaatttctgtgtcacaagtaatgctaaccccaagccaattacatttagcaagatgacggtcacgataacaaaagctaccgtgaaccaaaaggcgtttccgaatgctttatcttgtaataaggccatgtagtttttaaacccaacgaccttagtaaaagagagtccatcccagtcagtgaatgaatagaataggccctccagcattggaatgaaaacgactaatgctaatgcaacaagggtaggggttaaaaataaccaaaatgataaactcttatttttcatttcaataccctctttttgttttatccaattgaataaatttatttagtttgttgttttgtccaaccgtccttcatatttgaaacagtcttttgccaatcttggtcacctgatagatatttttgtaggttaggttgggcaacgtctggatcccatgatgtgccagtataacccgggaaaacccagccgaatgttgctttcttttgactgtaatcatagaccgattgtgtgagtgcatctggcatcttcacatcaccgtaacctttataagcaggtacgaaatgtaatttctcaacaacgtcttttttaccttctttagacgtatatagccagttcaagaagtccttagctgctttttgttcgtcggtactcttccgtttattaactgcccagtagattgaggtcccaacaggcatcttaccttgttgttccttaactggcattggaatcatgccgatcccgtcttgagcgaatttcgcatcaatttggttaacggtttcgtaaatccagtcgccttgttgaatcatcgcaacttttccttgagcaaagttttggttcacttgtcccgcgtaatccatttgcatgactggttgaacggaatattctttttgcaaatcaatcatttgtttcatttctgcattgttttcaaacttcattttctttgaggtatacaacttttgtgaattgccatcaaattctttacttagataaacattcaacaaatgatctgaaagaacccatgattccttaccaggtaaagcaaagactcctttaatgcctaattgttctttttgttcatttaatgttttaacagctgcttctaatttatcgtaagtcgttaagctctttggatcgataccggctttttcgaagacagctttattataaacaaaaccatagccttcaatgttaaatggcaagccgtaaactttcccttgtgacttaacagtatctagtgtgcttggaatagcggccttagcagcttttgtatccgttaaatcagccgtgtagttcttgaattgtttaaccgatgctggcccatctaaactaaaaatagtaggtgcattcccggatgaaattctcgtcttcaaaacgggattatactgtgtcccaccaccgattgatgtgatttcaatcttgacgtttggatgtgctttttcatacttcttcgcaatcgctttgaattgcttgttggattccacttttccttgtagaattgtgattttcacattgccgccatccgcactcttgctcccacaagcagccaatgttaacgttacaccagccaataacgaaactaaccctagctttttccacatctttttcactataacgacctccaataaatttttatcagtgctgtttacaagttttattgtcgtactttgaaagcgcttttgcaaatgttttcctgatgttaccggtaacagttttcttatgcttattccgattgttcttttagcacggggcgaattgtcccgcccatttcaatgtttggttcgaatatcaatggtcgctcaatccactcctgattaattttcttgaggatattctctccgcatgcacggcccatttcaatgatggactgcttaatcgttgtcaacttaggagaggcaacttgatttaaaaagaccccatcaaatcctgtaatcccaaactcttgcggcacatgaccaccacacgacgcaatcccccgttcaatcccaattgccagacgatccgtggcacaaataaacgcagtctcgagtttgaattgcgcccagtgttcaatgatgtaggcttcggtcaaatgactatggttgttaaaatggtgtaactgaacaggacgctgctgctcatgcattaattgtaaataaccggcttcacgtgatttttcaaacgcttcttcactcgccattccaatataaataagctggcgataaccacgctctaatgctaattgcgctgcaaggtaggtccccaactggttatttgtatccacataatcaaaaccgtactgattctccccaaaaacgacgactggctttgtcagatcgcgaatccatgcaacatcactttcacgcaatcccgtaataatgtagccatcacaattcccgatatcaaagttacgccaagttactaactgcagcgaatactgatgtaggtcaagtgccttagcaattccgaccattagattcatgtaatatggttcggtaacgtcgatgtcttccaagatacacaatttgatgattcgggtactgttgctgactagggctttggcaattaaattgggacggtaatccaattccttcattgcggcatacaccaattccttcaattcatctgttacttgttccggatgattaatcacccgcgaaactgtcatcttagaaacgtttgcccgcttagcgacgtccattaatgttgccatttctccaccccttaagttcaactttttatattctttcacaattataccaatttatgcataaaatgattacgatttaccttattggtattaaaaaagcccatcatctaaagatgatgggctttcccttttttattctataattgtttgatttatctgccgtaagtgctccaagtccgttgctttgatgccagtatgcttagtaatatctttttttagcgctttgtacttgcggaggccttcttcagttgcttctaaccaaacattccgttggtcattttccatatcacgaattttgcgaataaactttttactttgtagcgtattgattttacgggaagccgctggtgcggaggtcccaaatacgactgcaatttggcctggggtgttccgtcctagttccacaatctgttccaacacgagaaattgatcataacttaagccatgtttttcgctcattttattcaattgagtcgtgatgttctgacactccagataccactcactaattgttaatattcttttattatctggcatctgcaaccctccaccgttcattcaatatagttttaacttatgtacaataaatgaccaccggctagtcaaaagccgacaatcatttatttaaaacaaactagcgactcatttcaacttgattaagcagcagttaaggttagtttatatcattgtttggttatgtgcaagtatatttcacgcgacgataattgtcaatcgttcattaaaaaccttttaaaaccaatgtttgagcgatgtttttcggattattttaatttgtagataaacttacgaattttctgaaaacgccaataagaacctttgatgcgaaggggtcacaactcatgagttatgacctagtttatttttataaatgttaattataaaaagattaaaattagatgatgaaaattgcggataaaatgaagctccagcgcgaccattttgatgacatggaaccgaatacaaatatcggcattaaagaagtttacacatgttgcataatcatagatagggattatctctttaaaagatttaacagattcgttttaaaacaacttgtacacaatttaatagcttatcagaatgaaaaaacattaagtccaattggtgattaattgattgaatctttgatatcccaattgataactagaccgtaccaaaggtgtagtgatgaatggaaaaatagaaaaatcatatggaggtagacgatggatagaagaaaattagcgctgggtgcaacaatgctgaccatgttattgacgtttatctgtatcaatagtggtcgtactcaagcagcgatacccgcccatattccaatcgatggcatctttaaaccctccattggggtagatagttccgttcaagcaggtggaattgtgcaagtgacaccagatagccagaacaagaagggggcaatttggtcggaagagcagtataagattgatttgacacataattttacaagtttaatgtatgtcaatttaggggacaaaaaagcgcaatcggttgacgggatggcctttgcaatgatgaatgacccagacaaggttaagaattggcagcaagtgaccggtggcgcccttggtgtttggcggaatccattttcttgggtaaaagataactcagcaatcgccaagtcatttgccgttgaattcgatacgtaccataatggcaatgattttgacggtttgctacccaatgatggcccagatagaggccatgttgcttataattttccaggacaagatagtgcatatcagcgtttaccaagtcgcttgtacgcgctaaaccatctacaacttcaaaaaccgcaaaatggtgattatttatcattagtaacattaggccatatcgtgatggcaccaagtgtacaggctgcgacaacatcgaatgaaacaactacgaggaaaattgcactagaagcaggggacacaacaacgactaacccaccaattgtgccagggacagatggaaacggaaacggaccaactggcgcaacaggggatatcacgattgataatttaacaccacttgattttggtaaggtgaaactgactggtggcgcgcaaaacgttaagaatatcgttaaagatcctaacgtacaagtcaccgataaacggggaactggcgctggctagaatattaccgttaaaagttcagaatttaaagacacaacggattcaacgcatatcttaaaaggcgcacagattaattttccagtcggtaaagtagtcgctagtgattcaacgaatactgctgcaccaacagccaaagcgattactgttcctgctgatgggttggataatgcgcaaatcttgatgagtgctgataaagataaagggatgggaacatgggcagatgtgatgacaactgacggcattacactggatatcgctggtggcgcttatgctggcagctataatgctgatttgacctggacacttggggatacaccgcttcaattagctggcagcagccgctaaatttgaaagaggcaagtgttaagtcgttactgcaacggactaaattttaatcgatgtgcaaagtgattaaagagagggacttcaaaaatgaaatggatgcatattttacaaagaatcagcgtcgtcatcttaatgggcggcatcgcgttgtggttgaatacaacgaccgtccaagcggctgatcagagtatgaattaccaagttaaagcgaatttacccagcagtcaaaacaatcaaagtgtaacatattttgatttaaggctggcacctaatcaggaagagacgattagtatcacggtgcaaaataaggataaccaagcgcatatctttaacatcagtccgaatacggcggtgactaatcaaaacggggtcgttgattatagccagtcaaagaaaaaagcggatgaaacggcgcctgctaatattgcctcactgattacgggggataaaaaagtaacggtgccggctcacagtagcaaggacgccatttttaaaattaaaatgcctgctaagaagttccattgtactttattaggtggttttaatattgttcgtgaagggcagcctaccgttaaaaagcaaaagaatcgcgtgacattgcgtaaccaattcgcttatgtaatcggtctgaaagtgaccgaaagtgatgccattattgcgccaaatctgaaactgaatcacatcaaagcggggctcgttaactatcggacagcaattacggctaatttacagaatacaaaggctgttatgatcagaggcttgaaagttgatgcggtggttaccaagttaggctctgatcaagtgcttcaccggacagtcaaatcagacattgcgatggcaccgaattcgaactttgagtacgccatcaactgggataatgaagcgctgaagccgggcaaataaatgcttaagctaaccgccactgataagtcgggcggttagtggtattttacgagtcggtttaatattacagagcaaaaagcccatcaagctaatgaccaagccgttgatttacaaaaaacaaccattaactggtggtatatcatgtggtggcatattcctggtgctcttagttgggtatattatttttctaaaacgacaagcgaaaaaagcctgattcaatgaagtcccaatcctgagcgcgtcatcgattagaatggattcgaaaataatcccttgataatgaatagatggaagtattatctctattcactaccaagggatttttatatgtgctgcgttattggttgttcggttaattaggtttaaaaaagagggaatggattttatatcacgttatttacgaatgatattcataaacagtggttttttgatgccatttaacgtataataaattaaaaacaaattagagatgaggcaagaatattgatttcgactgaaacgacactagctgggtaccactttgataactgtttcatgaacgcggcgggggtttattgttatgatgctgctgagttaaatcaagtgcaggcttcaatggcagggactttcgtgaccaagagtgccaccgttatgccccgctctggaaatccagaaccacgttatcaaccaacgcgtttaggcagtatcaattcaatgggcttgccgaatgaaggcctaccttattatttagactatgtgagtcaacagcaaaaggcagtgccagacaagacatactttcaatcgattacgggatttaatattgaagaagacgagcaactgttggcacagattagtgcttctgattttaaaggtgtggtggaattgaacttatcttgtccgaacgtaccggggaagccgcaaacgggctatgattttgaaatggtggaacgaattctaacgcgagtttttacggtttatcacggtccattaggcgttaaattaccgccgtactttgatatcgtgcattttgatcagatggcggcgattttgaatcaatttccattagcgtttgtcaattcggtgaatagcattggaaatggcttgaaaattgatgtggcaactgaacgggttgtgattaaacctaagcatggtttcggtggcatcggtggcgattatatcaaaccaaccgccttagcgaatgtccatgccttctatcagcgtttgaatccagccattcaaattattgggactggtgggattaaatctggtcaagatgcatttgaacatattttatgtggggctagcatggtccaagttgggacagcgcttcaaaaagaaggccccattatttttaaacgtttaacgcgcgaattacagacaagcatggctcaaaaaggttatactaaactgtctgactttagaggcaaattacaatatttagattagttgaaatgaggatttacaatgcagtatcgttatttattttttgacatggacaatactttattcgattttgatgcggatgaagatcaagctttggcccaattattcaaagatcaaggggttcaattgaccccaacaattaagacaacttatcagacctttaatcaaaacttgtggcggcagtatgaagaaggtacgttaacccgggaaatattattgaacacacgctttgcaaccttctttaaagaacagtttaatcaggaagttgatggaccaagattgtcccaaaattatttagacaacttggcattaggccatgatttaatgccacaagcagaagctctgttaaaggcgttaaaagcagctaacattaagctatatgtcacaaccaacggggttgccaacacgcaatatcggcggttacaagattcaggattaatcacatatttcgatgccgtttttgtttcggaagagttgggatatcaaaaaccagatccacggtatttccaaagtgtcttccaacaattagaggggatctcacaagcagaagctttgattgtcggtgattcacttacttcagatgtgcaaggtgggcagaacgtgggtgtcgccacagcgtggtataacccgaaccagctagcaaatcaaatgacagacatacagccaacacacgaaattgaacacttaatggacttattggcaatttaaaagccgatttgcggcattcaagaggagtagataaaacatgaaaaagcaacgatattttagaattagcctaggttggcgaatcttaattggaatcggcctagggttagtggttggtcggtttttctaccataatcaaaccgctatctcaatcttacaatcaatcggaaccttgttcatcaatttaattaagatgattgtgttaccaattgttgtttcctgtttggtcgttgggattgccaagatgggtgatatcaaaaaacttggccgaattggtggtaagacgttattgtatttcgaagtgatgacgaccttcgcaattattctcggattagctgtcggcaatattgctaaaccaggagcgctgattgacattcatagtttggcacatggctcaattagtcagtacacagcagccgctaagaccgctggaaatcatggcttgggtgatatcatcatggatatcgtgccaacgaatttctttgcggccttggggtctggtgaaatgattccagtcatcttctttacggtcatgttcggtttagggttggcgacctttggtaaaaaggcaaccccgctcatcgatgcttttgaaatgatttcagaggttatgttcaagatgacaaactggattatgcagttagcaccaatcggggtgtttgcattaatcggggttacaattgcccaattcggatttgaagctttgaaaccattgctctatttcatcatcgtttgttacgcaacgatggcatttttcgtggttgttgtggctgggttggtcgcgcggatttggcacatcaatatctttgaaatcttgaaagttttcaaagaagaattggtgctagccttttcaacggcgagttcagaagcagcgttacccaaagtaatggaaaaagtgcaaaattacggtgttagtcaagggattgcttcttttgtcattccaacgggttattcatttaacttggatggttcggcaatctaccaatcgctagcggcgctgtttttggcgcaagcctatcacattcatttaagcctcacccaacaaattactctattggtggtcttgatgattacctctaaagggatggctggggtccctggtgcttcattcgttgtcttattagcaacaatcaccacaatcggcgttccggctgctggtgtcgccttcattgcggggattgatcggattgtggatatgggacgaactgccgttaacgtaatgggaaactcattagcagcagtcattattgccaagtcagagaacgaatttgatgaacaaaaatatcaacaatatatgagtggcaatgaacttaaataaagcaaagaccttaaatcaatcgatttaaggtcttttttgtataaaaaacgattttagcacaccgcaaacattagcggtatctaattataaaagcttaagtaatgcgacttttagcgcttttttgtcgattatctagaccaatttcgcagataatctaaaaaatgattagacagattagaattttgtggtaaaattaatccagtaaagcgttttaaaaaataaaaacgtggaactgttaactcagtcaataatgtttaagccattatttttttatattaattgatagcgttttattgatgagtatgacaactatttttattaaggaggtttttgtgaatggttggaatcgttattgcaagtcacggggagtttgctaaaggaatcatgcaatctggctcaatgatttttggcgaacaagaaaaagtacaagctgttacttttatgccaaatgaaggaccagatgatttgaaagcgcatttagaagctgccgttgcaacgtttgatgcagatgatgacgtcttattcttagttgatctttggggaggttcaccatttaatcaagctaatgggttgttcgaagcacataaagataggtgggcaatcgttacaggattaaacttaccaatgttgattgaagcttacgcatctcgtttatctatgacatctgctcatgaaatcgcagcacatatcattgatgaagctaaagcaggggtacgggttaaacctgaagaactacaaccagaagaagcacctaaggcagaagccgcacaaacgacttcaaactcaggcacacctggtaagttcaaatatgtcttggcacgaattgattcacgtttattacatggtcaagttgcaacgacatggtcgaagacaactaacccaacacggattatcgttgtttcagataacgttgctaaagatgaattacggacaaacttaattaaacaagctgctcctagtggcatcaaagcacacgtcgtgccagttgatcaaatgattaaattggcaaaagatgaccaacactttggtaaggaacgtgctttgttattatttgaatcaccacaagatgcacttagagcagttgaaggtggcgttccattagaaacaattaacgttggttcaatggcgcactcaactggtaaagtgcaaccaaatactgttttggcttttgaccaagatgatattgatacctttgaaaaactaaaagctaagggcatcaagttcgatgttcgtaaagtgccaagtgactcaaacggtaacatggatagtatccttaaaaaagcacaagcagaactagacaaacaaaataacaaataacatcagaagaaattggaggattaataatcatggatttgaatttcattcaagtgattttggtcatttttatcgcatttctagctggtatggaaggtatcttagatcaattccatttccatcagccagttattgcttgtacactaatcggtcttgtaaccggtcaattactaccttgtcttatcttaggtgggacattacaaatgatcgccttaggttgggctaacattggtgccgctgttgcacccgatgctgctttggcatcaatcgcatctgcaattattttaatacttggtggccaaggaaaagccggcgttacatcagctatcgctatcgctgttcctcttgccgtagccgggttattattaacaatcatcgtacggacattagcaactggtatcgtgcacatcatggatgctgctgctaaagaaggtaacttccgtaagatcgaaatgtggcaatatatcgctattatcatgcaaggtttacgaatcgctattcctgcaggcttaatcttagcaatcggtgctggccctgttaaagaaatgttgacagcaatgccaatctggttaacagacggtttagcaatcggtggtgggatggtcgttgccgttggttacgcaatggttatcaacatgatggcaactaaagaagtatggccattcttcgcaattggtttcgtacttgctactatctcacaattgacacttatcggccttggtgcaatcggtgtttcacttgccctattatacttagccctttcaaaacaaggcggctcaggtaatggcggcggttcaaatactggtgacccacttggcgatattatcgacaactactaagaaggaggctaacaattatggcagaacaattaaaattaacgcgtaaagatcgtatttctgtttggctacgttcaactttccttcaaggttcttggaactacgaacgtatgcaaaatggtggttgggcttactcattaatcccagcaattaagaaattatacaaaacaaaagaagaccgggcagctgctttagttcgtcacatggaattctttaatactcatccttatgttgcttcaccaatcatcggggtaactttggcacttgaagaagaacgtgctaatggtgcaccaattgatgatgttacaattcaaggggttaaagttgggatgatgggacctttggctggtatcggcgatcccgtattctggttcactgttaaaccaatcatcggtgctttggctgcttcacttgctatgagtggtaacattcttggcccaatcatttactttatcgcttggaatgctatccggatgtcattcatgtggtatacacaagaattcggctaccgtgctggttcaaagattacagaagatttatctggtggtattttgcaagacatcacaaagggtgcttcaatccttgggatgttcatcttaggttcgttggttaaccgttgggtatctgtcaagtttacgccagttgtttcatctgttaagttggacaaaggcgcattcatcgactgggataaattacctagcggtgctaagggtatccaatcagccttacaacaacaagctcaaggtttgtcattgacaagcaataaagtgacaacgttgcaagacaacttggatagtttaattcctgggttagctgcattaggattaacattattctgtatgtggttacttaagaagaaagtctcaccaatcgtgattattcttggcttattcgtagtcggaattgtcttccatctattacacttaatgtaaaagagtgcataagcaggcgcctatattttgaggattaactggatttgacgaattggcgatgcaatcgccgatttggcaaatttggttaaccgcaggaatatgcctactgaagcacgtttagaaaacaaaggaggggctaggacaaagtcaatttgtcctagcccctcctttttataaaagcgtataatgaaagtaagtttttggaaatggagtcgatattatggttcaatcgattaatacaaaggtggacttagtgattaaagccacgtcgtttacagcactctctgattacggacaaatcatgatcggggatagagggtttgaatttttcaatgatcgtgacgcacgacaatttattcaaattccatgggaagaagttgactatgtgattgcatcagtcatgttcaaaggcaagtggattccccgctatgctatccaaacaaagaaaaatgggacgtatacttttgcttcaaaggaacccaaaaaagtactccgcgccattcgcgagtatgtgcccgcagaacgcttagttcaatcactaggggtctgggatgtgattaagcgtgtgtttaaacgcaaatcaaattaacttcaggaaggtgtgaccaatattggtcacacctttttttgaatcgaattgcctgtgattttaattggtaccgatttgagtggcgtgctagaatatcatataaggttgattgttcaacattttaaaaaattaagttaaatgaggtaatgatcatgggatttgatgaagcgattaatgcaattaaggctggcaaaaaagtggtacggactggctgggatggtccagaattatttattttccaagtggccgatgggacattcgaggggcaagcaattagtccctacctattaattaaaacaaccgaaacaccagcatactcaatgttccaaccaacatcgtgtgatgtattggctgatgattggcaattggtcgactaatggggcattttgcagatttagcgactaaaaccattttaattaccggggcggcatcgggaattgggtgcgctcaagtggacgcttttttagcagagggggcattggtgttagcacttgatcgccagccgattgaagtccctgttgatagtcggtgcatcacagcgcaggttgatgtttgtgatgaaacgcaattaacaatgacattagcgactttgctggcagaacatggcccaatcgatgtggtctgcaacacggcaggcgtgttggatgcttatgcaccaacgcttgataccagtagtgcggagtgggatcgaattatggcaacgaatttaaaaagtcaatatcttgtaacaaatgcgatcttgccaacaatggttgcgcaaaagcgtggggtattcgttaatatggcttcgattgctgggctagttgctggtggcggtggtgcggcttatacggcatcgaaacacgccatcattggctatacaaagcagcttgattatgattacgccgctaaggggattcgcgccaactgtatcgccccaggtgcgattgagacgccgatgaacgcagccgatttttcggggactggtgagatggcacaagaagttgcccgtcagacaccagcggggcgttgggcacaaccaactgaagttgcgagcttaagtgtttacttggcgagtgatgttgcggattacattcatggcaccgtcgttccaattgatggtggctggattgaaaaataacgctgactaaggagattatgatggcaaaacaaattaaattaagtcaaaccgtttatgaattggtaacggcctatcctgaagtggtgtcggtgcttgttgaaattgggcttgatggggtcacgaacccagcgcttttgaatactgcggggcgttttatgacattgcctaaaggagctaagatgaagcaaattcctttgacgacgattatcgctagtctagaagcacaaggattcgaggtgttagctgatgtgtgagcaacagcatagcagtgcgtaccgccaaaaacgaatcgtggaaatcttaaaaatgctgcatgaaggtggctcgtttgaagaggctaagcggatttttgatgagtccttttctggggttgacgtgtctgaaattacgtctgctgaacgggaattgattgccagtggcttgaacccgatggagattcaacatttgtgtaatgtccatgctgcggttttcaagggggcgattaattcaaatggggctgaaacgccggaacaagaacagccaggacacccagtcgctgtgatgaaattagaaaatttggttatgaactcgctcttaaatgatgaattactgccatgtttgaagaaatggcagcagtcagggactgaccaaaattatctcgtgcggatgcaacaagcgttaaaagatttacagttgatcgaccgccactatttacggaaagaaaacttaatttttccgttgatggatcaatatgggattactgcaccacccaaagtgatgtggggggtggatgatcaaattcgggggttggtgaagacggcctatcaaatggtaactgcggaaccaattccggataaatatgcaattgaagcagccgttgaaaagatgagcaaagaaattcaagaaatgattttcaaagaagaagaaatcatgattccgatggttaatgaagtctttacaccagctgactggggactaattgcttctgaaagccaaccaatcgggtataccttaattccagacccattaccatggcaaccaagtgctgaagctattgcggcggtcgaaaagcggaccgtgccgaagattgcgcaagaactgaatgcgatggcgcaatcgttggcggatgcgcaaatgacgatccaaacaacgccaccagaaccggcaccaacttcgatggcggcagcggctaatattccgtttgaaattcacggacaacctgtaccaaaagcccccgctgaaaaagatgaaggaaaaccagaaatgccagattttgtgaaggcaatgttagctgacgaaaaagaagcggcaccaaaagcgaaggttcaagcacgtcgggaagcaccacaaccccatatcgaaattggcgtggataaccaagctaaaatcgttctaccatctgggtcgatgaatatcagcgaattgacggcgattctccaagtactaccgcttgatttaacctttgtcgatcaaaacgatattgtgcggtggttctcagataacgagcatcgtattttcccaagaacccgggcagtgattggccgcgcagttgtgaactgccatccaccaaagagtgtggataaggttgagaaaattttagcggactttcatgcagggcgagaagacaacgctgatttttggttgaacttccgcgggatgttcgtctatattcgctattttgcggttcgtaatccacagggacaatacttaggctgtttagaagtcagtcaggatttaacggaactccgtgcactaacaggcgaaaaacggttataaaaatgcattaagaggagaaaagagatgcaacaaattattttattacttgccgtcggtgttttagccggcgtgttgggttcaatcttagggattggtggcgggatcattgtaacccccgtattaacgctagcgattggcctagatattaaatacgcgattggggccagcattattgccgtgattgcaacaagttctggtgcaactatcgcctatttgaaagatgatatgctcaacttacgagtggcgatgttcctagaaatcgcaacgaccgtcggggcgattatcggggcgttattgaccggcattgtaccaactggattcttattcatcttattcggcgcattcttgctattttcaacgtacaacatgattcaaaaattacgtggtaaagttgcagaacaacacgtcggcgctggtgaagataagtgggccaagaagttgaacttaaatggcacttactacgataaggccaaccaagaacaagtcgactacgctgttgaacaagtaccaggcggctttgccatgatgttcggggccggcattgcttctggcttgctcggtatcgggagtggggtattcaaagtgaccgccatggatacgattatgaagatgccattgaaaccatcaagtgccacgagtaatttgatgatgggggttacggcagcagcttcggccactgtttatttcttcagcggtgcgattattcccagcgttgctgcaccgttagcaatcggaattttggtgggttccactgtgggttcacggattatgcagtatttgcaaccacgtgtgattcgcatgatttttatccccattttgttatacacaggtttacaaatggtgcttaaaggattcggggtgcatatttaatgacagataaaaaagcagagatggctcaaattgaactcgtcatcggtaaaattttacgcattggggtggcggtttcagcaacgctgctcattattggcatgttacttgcgattattcatggcggtacaggttattcagaatatcaatttccaacgacctttaccgaaattttcagtggcattgctgcatttaaggctggcgctgtgattatgttgggcttattctgcctcattttaacgccagtcttgcgtgtggtggtatcaatctacgcatttgctaaagaaggggattacctctacgtttggattacggttattgtgttggtcatcttaatcatcgggatggcaattggttttataaagaaataaagagtggtttattagctcagtatctcgcgaggattaaaaaaagggccaacgacaaacatgtttgtcgttggcccttttttttgtggtgaattaggctaatccgcagaagataaccgggcttactgcgcactctgatttaaaacgtgctccgacagacatccgcttccggttagctacgtcccgcaaacaatcgacgtcgtcgcttattcacgagattaggctaatcctcagcgtataatcgtctgccgtcgcactctactttgaaacgtgctccgtaagccatcttcttccggttagcgacatcagtcaaatcaccgactttgtcggcaatccgcctgattaagctaatcctcagaagataaccgggcttactgcgcactctattccattcctagtattcttttctttttttcttcgaattcttcgtgggtcattaggccgtcgtcgcgcattttgaggtaagccatgataagatcaccggtcttaacataactgaggtcttcttcaacggttggtttttcgagatagtccgctaaggctgtgtataacttgcgcacagcgaggttatcgtcgggttcgaaactgatgacgattttttcgagggcgtggttgggtttttggtagagaatttggagatgaccatgccgataagtcgcttcaaaaaagcggactgattttaatttgctaaacggaatgtcacgatcctggttttgtttcttcttaaacagtccgggatagtgaattgttaggatattttcgtcataggttaattcgagtttttgaggttttttaatgagataagtttgcatcgcttgctcctttaatcattcttaagtaaaagcacggtagttcttaataaatgaagcctaaacttacctttatcatagtagacagtgaccctaaatagcaagctgttcgtattggtttatgaaatgaggtgggatgatgaaattttttatgggtattcgcaacggcctgttagtggcattaccgatttggtgtttaataatcttctcaattacgtattggttacgctaaaataaaaaaacgggcgccgcacaaaaactgtgcagtgcccgttttttaacgtaaattggctgttttttaggtctaaagacggtttttatgctagtatgaatagattacaattagtgacattgattgcatctaggcgatgtaattattataatgaaatcaaatgtccaaagataaggaggaggaaaccaattgaatattgggatatttacggacacctactttccacaagtcagtggtgtggcaacctccattaaaacattaaaagaagccctagaaaaacaagggcattcggtctacatatttacaacgaccgatccacatgttgacaaagatgcagtcgaaccgaatattttccggtttgctagtgtcccgtttgtctcatttacggatcggcgaattgctgtgcgcggcttatttcacgcttatcaagtggctaaggaattggatctcgatatcgtgcatacccagaccgaattttcgatgggctacatcgggaagtttgtcgctaaaaatttaaaaattccttgtttacatacgtatcatacgatgtacgaggattatttacactatgttttaaacgggaagttattacggccataccatgttaagcaaatgacaaaggcctttttatatcacatgtcaggcatcgtggcaccatcagagcgggtttctcaaaccttaaatggctatcaagtgaaggcccccatccggattattccgaccggggtcgatattagtcgctttgagcgcgaagtgacccgcgacatacgggccgaattgggcttgacgtcagaacaacctgtgctcttatcattgagtcgcgttgcttatgaaaaacggattgatatcttagttgatgcgttacccaaactagtcgcccaaacaccagatttaatgttagtgattgttggtgaaggtccagctcgagaagatttagaagctcaggttgccaagttaaacatgaccgaccacgtgattttcactggaatggttgataacgatgaagttgcaaattattatcatatggcgaatctttttgtctccgccagtgactctgaatcacaaggattaacttatattgaagcgatggccgctgaactcaagattgtcgtcatgacaagtccatatgcggctgagttattaactgatccttcaattgggacgacatttacgaacgaagatgaaatgatccatcaagtatcgaattatttgaatcatccacatgcatttgatgatccagcaccgcgccgaaagaagttgcatgctatttcggcggattactttgcggaacagatgattcatttctataagcaatcacagctattatatgacgaattaaagttagaccaagatgatttattggaattagaagatttagatactaaaaaataagtcgcgctggcggaaaactgttgatcatataatcaacagttttttcatatcgttgctaataacaagaaaaagggtcgtttatgagtagaacgaataagattgtttttgcagtcatgctgttgattgggtgtgggatttttgcctatgaaagtcgcacgctggcgttgaaacagctgtttatcgatattagtcatctgaaactttggtggctgttggtcgccttattatgtatgttaatttcgtggtttttcgaagcacttgtcttacgcgtctttctaaaagaccgcacagaacacttttctttatacaatgcgcttcggattccgttgattgcacaactattcaatgcgattacaccgttttcttcaggtggacaaccggcacaactggtagcgttgatgcaatcccgtgtagaagctgggcaagctagctcagtactgctgatgaagtttattgtttaccaattcatggtactggtgaatttcttattaagtatgatgattggtctctcgcaagtttccaagcattttgggacgctgtcgattttgattactttcggattaatcgtgcatgtggttgtgttagccgtattgttgctaatcatgtattacaatcgatttacgaaacagttagtgcactggttattaattccggtgggctggttcgtctcccaaaaacgggtgacggaatggcggacaatgttaatggccaaaatcgataccttttacgcggagagtctacaccttaaacgcgagaaaaagaaactaatcaagggctgtattttaacccttgggcaactttttttctattatagtgtgccatactttgtcttattggcacttggcatcccgcatgttaattatttagaggtgatggtcttacacatcatgattgtcatgattgtctcgctctttccagttccaggcggttctggtggggcagaatatagttttaagacgttatttgccacttttatcccgagttcaagtaaactggtgttaggcatgttgctctggcgattgtttacgtactatctcgggatgttcatggggattggggcgttagcagttaaaccacgagtaactgataaaaagtaggaggcgtttttgatgcaaccaacaattggcttcattggaacaggtgtcatgggtagtagcatggtcaagaatttattgaaggcagactatccagttgtcgtgtataaccggacaaaacaaaaagcggatgcagttgtggcactcggtgcaacatgggctgattcaccagcagcggttgtcgcgcaaagtcagattgtgttatcaatcgtcggttatccgcaagatgtcgaagccatctattatggtgaagacggaatttttagtgctgcacaacctggtcagattttggtggatatgacgaccagcacgccaacattggcgcagagaattgccaaaacagcagctgacaaaggtctgcaagcattagatgcgcctgtttctggtggcgatatcggcgcccaaaacgggacgttgacgattatggtcggtggcgatcaagctgcctatgaaacggcattacccttttttgaagcaatgggtaagactgtccatcgcttcggtgctgccgggacaggccaacatacaaagatggccaatcaaatcatgattgctggcacaatgaccggaatgacagagatgttagtgtatgctaaagcagccggattagaactagaagcggttttaaacacggttaatggtgggagtgctcagaactggagccttgcaaactatggtccacgtattctagcgcaagactatacaccaggctttttcgcaaaacattttttgaaggatttaaagattgcattaacggaatccgaaaagatggggctccatttaccagctacgcttcaagctaagaaactctatgcgcagctcgttaatgataaacaattaggcgacgatggcacccaagctttaattaaattatggtggccttctgcaaaataattggatataaacggtgcagaagtgctctttttctgataaactgatagttagttattaaaggaggcttcgccatgcaatcatcacagttagttgcgattatcaaacgtctggtagcaatgcaagaagatcaaagcgctgaggttcaagaaagacgttttgaaaaggacggcgatttaaaagcaactgttagctatgatcctcaagctcaagcatttgaacttgaagacagcaacacacatcaacaattccaatttgacaatattgatttagttgcaatggaactatacgatttattagcagactagttaattaaccattgagtatcgaattacttgatggtttttttgctacttaagcaggtgatagccttgctcagttgcgactcagattattaaaaatggtttaatatttggcattcaagccggttacatattgcttttcatttcacggatgtgtaaactaactttcagattgtcaacggcttttaaagcccaacgacctttaacggaggctactgtatcgatgaaacaaattggtcataaaattcaatcaggattaagcacacgatggggattcttccttttcgcagttgcgctattctggcttaaaacaatttacgcatatcaaacaaaatttaacttaggcgtcaaaggtggcatgcaggccttcttaatgacgattaatcccattccaacaaccttattgctatttgggattgccttgtttatgaatggccgaaagtcatacattacgttgattattattgatttaataacctcaacttggttattctcgaatattttgtattaccgtgaattttcagacttcttaacgtttaacttaatgaagggctctggtgcggtatcaaataacttgggcaagagtattgctgggattattgaatattctgatttcctagttttcgctgatgttttattgctaatcatcttattggctactaagttagtgaagattgatcaccgtgtctttatgaagcggaatgcatttgcaattactgggttagctgttgtgttattcggtgccaacctcgggattgcagaagcagatcgttctgggttattaacccggacgttcgataacaactacatcattaagtatcttgggatgaatgcatacactgtctatgatggcgtgaagacgaccaagaataatgcgattaaggctaatgctgatagtagtagtatgagtagtgtcttgaagtatatgaaggacaaccgggttgcacccaatgttgaatacactggcgtggctaagggtaagaacgtctttgttatccatttagagagtttccaacaatttttaattgattataagtgggacggtcaagaagtcacaccaaatatcaataagctatatcacgaccaaaacaccctcagtttcgacaatttctttaaccaagttggtcaaggtaagacggctgatgctgaattaatgctcgaaaactcattgttcgggttacctgaaggggccgccatggtcactcaagggacaaccaataccttccaagcagcaccatcaattctagatcaacaaggttacacaaccgcttcattccatggggatgtgccaagtttctggaatcgggataatacctacaagtcatggggctatgattacttcttcagttctcaatactttaaagaaggtaaaggctacaacgtgggttatggcttgaaagataagatcttcatgcaagactcagcccaatacattgaacaattaccacaaccgttctatgctaaattaatcaccgtgacaaatcactatccatacttattggataaacaaaatcaatcaattgctaagaccgatactggtgatgatacagttgatggttatgtgcaaaccgctaagtatttggatcaatcaattggtgaattcttagcttggttacaaaagactggcttagataagaatagtatgctcgttctatatggcgatcattatgggatttcagggaaccataagaaggctgttgcgaagttattgaatcaggataaatttactgattttgataatgcgcaattccaaaaagtaccgttcatggtgcatatggatgggttaaaaggtggcgttaaccatacctatggtggtgaaattgacgttttaccaactttattgaacctattaggtgtaaaaaatgacgataccatccaatttggttcggatttacttgcgcctaaccgcaatcagacggttgtctttagaaatggggactttgtcacaccacagtatacgaaggtaggcagcacctattacgatacgaataatgggaagacgctgacgaatttaacggcagcgcagaagaagcaattaacggcaatcagtgaacatgtaacggaagaattgtcactttctgacaaggtaatcaccggcgatctacttcgattctatacaccacaaggattcgaaaaaccagataagtctaagattagctacaaggtgaaagatgctaaagctaagttgaaagacagtaacaataaaacgagtgttatccagcaaaataatggtaagtcaacaatggacctttatgagacggatgcacctgaattgaagtaaagtatgtaaagacgttacgggactcgcgtaacgtctttttttgagcaaagatacttgtcagtctcgtcaaaaaaaggtacgattacagcaataaggatatatgataatgattatcattagcgaaaggtggtggcaaaatgagtcacatcgtgcaacaaacgttacggaaactcaaagaacacaacgtacggatcacgccacagcggcaagctgttttggaattcatgattggcactcatatgcatccgactgcagacgatgtctataaggcgctagcagggcgctttccgaatatgagtgttgcgacaatctataataacttgcgtctgtttacctcattagggattattgaagaaatggcttatggagatgcatccagtcattttgattttgcgcagaccaagcattatcacgctatttgtgagaactgtggaaaagtagttgatgttttttatccggagttagatgatgtagaagtgattgctgagaatctaacggggtttatggtaactgggcaccgaatggaagtgcatggtatctgtccagaatgccaagcaaagcttgcaaataactaagttgtttgaatatttagaaaaaagatgaattttatgcaaattttacttgacgatagatttagatgttggtatagtattctatgttgtcagcgagagaaaagctcatcgctaacgaaataacgggtcaaacgagattgaataaatattcagaaaatatttataaaaatcgcttgacagtgttcgttagaaatgatatattaattaagctgtttcaacacagtagatctttgaaaactgaacaaagtttcgataaaccaaatgtgtttttaaacagtttgtgaaaatgagattattcacataataatcatttgcggatgcgttataatattagaatgattcttataatggctctgtatcaatgaaaataaattagaatattttaatctttattatttacttttcatttttaatcatgtattattatctttaataactgaagggagtgtccatatgaaacgagaaaagagtttggtattaggtataacaacagtggcggtcacattattattagcagcttgtggtaactcaggtagcaaggaagccgttaagactgacacagccagttttgcaactggggatgtcatttcgacaatggattcagcgttaaatacggatgtgatcggtgcacaggctttaaccgatacgatggaaggtctttaccgctacgagggtaaagaaattaaaccggcgattgcgactaaagtagtcaaaccaactaataacggtttaacatatacattcccattaagaaaagacgcgaagtggagcaacggtcaaccggtcacggcagaagatttcgtttatgcttggcgcagagtcgttgatccaaaggtcggttcacaatatgcttatatctatgaaggcattaaaaatgcagcagacatcacgactggtaaggaaccggttaattcattgggtgtagtcgctaaggataaacacaccttagaagtcacccttgaaaaaccaattccatacttcagtcaattgatgaccagttcaacattcttcccccaatatccagaagcagtcaagaaagctggcaagagttacgggacaaattctaaaacattagttttcaacggcccttataaattagaaaattggaatggcccagatagctcatggaaagaagttaaaaacaccaattactggaatacgaaagcagttaaggttaagacgttgaagtatcaagtggttaaagatccatcaacagctttaaacctcttccaaagtaataaattagatcggacggcgatcagtggtgacacagctaaacaaatgaaaaacgatccacattactcaaccttacaaaaatcagcaacattctacatgcaagtcaaccaagaaaagaatccaatctttaaaaatgcgaagattcgccgagcaatttcaatgacaattaatcgtaaagaattagtcgcacaggttctaggtgatggttcaagtccaattgcttctgtgacaccaaagaatatgtcatttgacccaacaactaagaaggattttgttgatgatttagacgcagcgggtaagaaaaatgcaagttacaaccctaaagaagcaacaaaactttggaacgaaggccttgctgaaactgggcaaacaggcaaaacattcaattacacattacttggcgatgatacggatactgccaagaaacaatccgaatatttgcaaaatactttacaaaagaacttaccaggtttgaaagtcacattagcgaacgtgccatttaagactcgtttaacacgttcaacgaacggtgatttcgacatggtggttagtgcttggaacgctgatttcccagatccaatcacattcttagacttgtttgtaacaggcggcgataacaatgatggccattggagcaatgccgaatacgatgcacagatcaaggcaagtaaaggtgacaacgccaatgatcctaaagcaagatggcaaaaccttgttaaagcacaagatattatgaatacagagtcaggtgtcattccactgtatcaatcaggtgtggcgtacttaactaacccaagccttaaaggtttagactacggcccttcaggaagctacaataatgtctcactttatttaaaaaaataaactgactttataaagatgggcttcagcgttgaaaaacaatgaagcccgtttttgttaggagcgaacttatgagtaaataccttattaaacgaatattctatttagtgctaaccctattcattgtcgcttctgtgaccttcttcatgatgaagttgatgccagggacgccatatacgaatcaggaaaaaatgagtgctgatcaattacggatcatgaatgaacagtacggtttgaacaaaccattaattcagcaatatttcatctatctaggtggcttgttgcatggtgattttggcacatccttccagttcaacaatcagcccgtcttgagcctaatcatgacgcgtttaggaccttcattacaaatcggggcacaagcgatgattgtcggctcattactgggtattttactaggggcagtggcggccattcgcaagaatacatgggtcgatggcgttgcaacgttcttttcaatcgttgggatttcaattccgaactttgtgttggcggtcttactccaatttttccttgcctttaaattacaactattcccaattgcgttatgggacggctggtcatctagtgtcttaccaacattagcactagcggttgcaccattggcgaatacggctcggttcatgcggactgaaatggtcgatgttttaaacagtgattacatcgaacttgctaaagccaaaggcaattcaaaatggcaaacagtggcaaagcatgccttacgaaattcaatgattccggttgttacgattatcgggccgatggcagtcaacttgatgactgggtcactagttgttgaaaatattttctcgattcccgggattggggaacaatttgtgaagtcaattatgacgaatgattatccaacaatcatgggcttgaccattttctattcattcttattaacagtgattattctagtcgtcgatattctttacgggattattgatccacgaattcgattaagtgacagtcagggggcgcactaaatggcggatattaaaataccagcgggctcattcaagccccttacacaagacacgcatgaagcacaagaaaaaattagtgcaccatcattgacgtttacgcaagatgccattcggcgcttaaagcaaaataaagtcgcggtggtttcattagttgtcctcttgattgtgatgttggctgctttattggcaccagtgattgcaccacaaagtccaaatacacaaaatgtggcgtacgctaacctaccccctaaaattggatcggggaatatccctggttttaccggtaagatggacgtttccggtgttaaagttgataaatatcaacaagcgggcgttcccaaaggcaaaacgtttatcttagggacggattatctcggtcgtgatttattatcacgaattttatacgggacacgcttatccttattaattgggattctagcgacattggtcgatttattaatcggaattccatatgggattgtttccggatggcgtggtggccgtttggatatgttcatgcagcgggtaactgaaatcatttcatcaattccaaacttaattgtggttgtcttgatgatgttggtactccgtccaggtttattgtcaatcgtcatcgcgattgggtttaccggttggattacaatggcccggttgattcgggctcaaacgttccaacttaaggaacaagaattcgtgctcgccgcacggacgttgggtgaaagttccaccaaaattgcttggaaacatctgattccgaatttatcctcaacgattattattcaaacgatgtttacaattccgagtgcgattttcttcgaagcattcttgagctttatcgggattgggattccagcgccgaatgcttcattagggacgttattatcagatgggcaaaaagctttccgtttcttgccatatcaaatgtggtatccagcagcagtcctctgtgtgatcatgattgccgtcaacttactagcagacggattaagagacgcattcgatccaaaatcatagcgtgtgtaagtaggcggttatctttcgcggattagcatagtctggcgaataatcaacttgttgattatttgttagacgtagctaaccataaaaagcagttaatgaaagcacgtttagaagcagagtcagtttcaaaaagcatgtcaatacaaggccgtttccacgcggtttcatcattggaggtcgtcaaatggcaaatattttagaagttaaacatttaagtatcgattttaaaacctacgcagggaacgtccatgctattcgcgatgtcagtttcaacttgaaaaaaggcgaaacactagcgattgttggtgaatcaggttcaggtaagtcggtaacggtccgtagtattatgggcttgttagcgggcaatgctcaaattaagggtggtacaatcaagtatcacaatgaagatctcttacaaaaaccagaacaggaaatgaatgccttacgtggtagcgatatttccatgattttccaagatccgatgacgtcattggatccaacgatgccgattggtaaacaagttgctgaacccttgttgattcataaaacaatgaataaggaagaagcaatgaaacgtgcacagagtgttttagagttggtgggtattccgaatgccaaagcacggatgaaagattatccgcatcaattttctggtgggcaacggcaacgaatcgtgattgcgattgcgattgttgattatccacaaatcctgattgccgacgaaccgacaaccgcgcttgatgtgacagtgcaagcacaaattatcgatttgatgaaggaattgcaacgcaagattgaaacctcaattattttcattacgcatgatttaggtgttgtggcagggattgccgatcgcgtagcggtaatgtatgctggtaagattatcgaatatgggttggttgatgaaattttttatcaacccaagcatccatatacgtggggcttattgaactcaatgccaacacttgatacttctggccgtcttgaagccattccagggaccccaccagacttgttggatccaccaaaaggggatgccttcgcaccgcgtaatccatatgctttacaaattgatgtggaacaggaaccgccatttttccaagtgtcgaaaacgcattttgcggcaacttggttgttgcatccagatgcaccagctgtggaaccaccagcagccgtccgtgcaatgatggctaagtaccaggcgacacaagttcaagagaaagtagggacaattgatggacaaggataaaaaagtattagtgtcggttaaacatttaaagcaatattttagccaaggaaaaaaatccgaagtcaaagccattgatgatgtctcatttgaaatctatgaaggcgaaacgtttggcttggtgggtgaatctggttctgggaagagtacaactgggcggagtatcatccggctatacaacccgacagatggtgaaattctattcgatggccgtgacattagtaagattaaaaatcatagtcgtgaaatgaaggcgttccggaaagagattcagatgattttccaagatccctacgcatcattgaatccacggatgaaagtcaaagatatcatcgctgagggcttgcatatccatcatttggttaaaaatgatgcagaatgtgatgcacgcgtcaacgagcttttggaattagttggtttgaataaagaccatgcaacgcgttatccatatgaattctccggtgggcaacgccaacgtattgggattgcccgcgcgcttgcggtaaaacctaaatttatcattgcggatgaaccgatttcggcgcttgacgtatcgattcaagcacaagtggttaacttgatgaaagaaattcaagaacagcaaaacttgacgtatttattcatcgcacatgatttatcgatggtgaaatacattagtgatcggattgcggtgatgcataacggtaaaattatggaattggcatcagccgatgacatttatgatcgaccattgcatccatatacgcaaagtctattgtctgctgtgccgttacctgatccaaaggtcgagcggcaacgtcggcgaattgcttatgatagttcaattgaggcagataatgaaggtcgtcaattgcgcgaagtggccgatgaacactatgtctatgcaactgaagctgaactagcgagttatcaaaccgctttagcagcaatgacaacgccatctgcataaagcaacgcctgttttgaaatattcgtttgcgtgttacaatgaatacttcaaaacaggcgttttttagtgattaataaaagaaacggtttgctaggaacgacgctgtttttttaagcgtataaacggtataatagtgaaagattaaacagttgaaatggggtaatttaattttggatgcagcactagtgagcgagcttcgagcccgctacggcattgaatttcagaatttagcactattggacgaagcctttacacattcgtcatacgtcaatgaacaccgggagttgggtcttcgtgataacgaacggctcgaattcttgggtgacgcggtgatggaaattacggtttcggaatacttatataaaaaatatccggactggccagaaggtaaactgacacgcttacgggcggcaatcgtctgcacgaagagtttcagtagttttgccaaagaagcgcactttgatcgatacattcgccttggtaaaggggaagaaaaaaacggtgcgcgggcacgagcaacacttttggaagatttatttgaagcttttaacggcgctttgttcttagatcaagggcgtggcgcagttgttaaattcatcgaacaagttgtctttcccaagattgaagccggtgaattttcagaccaaacggattataagaccaatctgcaagagttcttgcaacaagatggtgaagttgagattgaatataagttattggcagaagtgggaccatcacatgcccgtcaatttgaggtggatgtgatgatgggcgatcgcgtcttaggttcaggtgttggccggaacaaaaaagcagccgaacaagcagctgctaaagtggcgctttccaaactgaaataaagaaagaagcaaacgacagttgaaaccaaccgccgtgtgtagggagtttagtgcatgcagttaaagtcattggttttatcagggtttaaatcatttgctgataaaacagaaatcaatttttcagaaggtttaacgggcatcgttggaccaaacgggagcggtaaaagtaacgtcacagaagcaattcggtgggcgatgggcgaacaatcagccaagagcttacggggcgaaaagatgcccgacatcatttttgccgggactgatattcgaccacagatgaataaggcagaagtgacgctggcttttgataacagcgatcaatatttgaaacaagaacaagccaacgtcacgattacgcggcgtttatttagaaatggcgatagtgagttttatttgaatcaaaagagttgtcggttaaaagacatcgttaatttatttatggattctggccttgggcgagaatctttttcgattatttcgcaaggtcgggttgaagcaattttcaacagtaaaccagaagatcggcggaatattattgaagaagcggccggtgttttgaaatataaacaacaaaagaaaaaggctcaatctgaattagatcaaacagatgaaaatttgagtcgggtcaccgacattcttcatgaactacggggacaagttgaaccgttgaaggaacaaagcagtattgcgcaggattacttggatcaaaaagcgcaatatgatacgttgcaccaacaattattggtgattgaaattgatcaattagtggctgatcaaaagacgtacaaagaaaaggcgcaaacccttgcgcaagcgttgcaagagattgaagcggacatcgctaagacgacggctgcccaaaccgagaatcaggcaaccttagcccagttggaacaacaaatagaacaagataatcagacgttgttagaaaagtctcgcttagctgaaaatctattaggccaagagaacgtttcaaaagagcgcgctaattatacggatgcgaaccgccaaagtttagtcgaacagatcgacacattaaaacagcaattaacggcggaacaagccaatcaatctgaattaaaggcaagttatgaagaaaaggtgacggcattaagggcgttgaagacggagttaaccacccttaaacgccaagcgtctggtagtgaagcggaactgaaagcgaagattgaacaaattcgtcaagaatacatcgatcagatgcaagcccaaacgaccaatcataatgaacaacaatatttagaaaagaacttgttacaaactaaaacgcaacttgcacggcaagatagtgcagtcgatgagacatcgacgcaattggcacaaaaaaaggcagaacaagcggcccaaaaagcccaacttgaaacactcaaagcgcaatacgaaacgttgtccaatgagttggccgaattacaaacgcaaattaacacggaccaagcggcttaccaaaatcaacaaaatagttggttccaagcgtctggtattttacaaaaagcgaaagcaaaacaagccagtcttgcggaattaaatgatgactacgccggcttttatcaaggggttaaggctgtcttgaagcaaaaacaacagttccctggtttattaggggctgtagcggaattgatgcaagtgcccagtgagtatcaacaagcgattgaattagcattaggcgcacagctacaacaagttgtgacacgggatgaacagacggccaaacaagcgattgagtatttgaaaaccaatcggattgggcgggcaactttcttacccaataacgttgtcaaaccacgtttactaccaagtagcttagttcaccaattacaacagcagcctggatttatcggaattgccagtgagcttgtgcagtttgatgaacaagtgcgaccggtgatgaaccatttgatgggcaatttgattgtcgcgactgagttggagccggcgattaaattgagtcaattgacggggcatcgttaccgaatcattacgttagcaggggatattttaagcccgggtggttcgatgactgggggccataataaccgacaaaacaatggtgggctacttgcgcgtaagcaaaccttgactgatttagaaggtcaaattgccaagatgcaggtcgctttggatcaaaagcaagccagtgtccaagccgcaaaagctcaattaacggcacgccaagcagaattaaatacgaaacaagcggcattggaaaccgctaagaatcaatatcaagctgcccaaaatacgttagccttgactgacgaacgtttgagtcagtttgaacggcaacaacaagcaaccgattatcaagtgcaacaacaacaacaagcttatgaggcagatttaaaacgccaggcagaattagtggcagccgaagctgaaattgttgcgtcgattgcacagctgcaagcagatctcgaaacagctaatgagcaattacaacattttgatgagagtcaaaaacaaattgcgcaacaacaaacagccctcgaaaccaagttggctgtcgctcaagctgaacaaaagaatgttcaggagaaattaacggttgctactcgcaatagcaacgacctggcagcccagttgaaggccagtcaggataaactagctgcgctaaaacaagcggatcaagaagacgcttcgagtcaaaaagaacgacgagcactgctaaaggcaaccaatgctttgattgagaaagtccaagcgaagttagccactgaacgcgcgcaaaaagaaacgctgaaggcggaacaacaaacgcttcaagccaatgccacacgcgtctaccaattacaaaaaaatagtttagctgagcaagaacaaaatgctgtcgggctcaaccgggttaaaattaacattgatcaacgcttaaatacattgagcgaagattaccaattgacttacgaagccgccaaggccgctttggccgcatcagacttaaccgacgatcaattgcggtctaagttgaaattattgaaactcggcttagctgatttaggaacggtcaacttggcggccattgatgattatcaacatgttaaagaacgttacgatttcttgatgcaacaagatgccgacttgatggacgctaagcgccaattattagcatcgatggctgaaatggatacggaagttgaaaagcggtttaaggaaacgtttgaacaaactgccgctgcttttgaaaccatcttcccgatcatgtttggtggcggccatgccagtttaacgtttacggatccaagcgcactattaacgagtgggattgacattattgcgcaaccacctggtaagaaactacaacgcttgagtcttttatctggtggtgaacgcgcattgacggcgattacgttattgtttgccatcttaaaagtacgcccagtgccgttttgtattttggacgaagtcgaagcttcgttggacgaagccaacgttgatcgtttcggtcgtttcatgaaacgttatgagagtgatacacaattcatcgtgattacccacagaaaagggacgatgacccaagccaatcgcttatacggggtgacaatggcggaatctggaatctcgaagattgtttccgtttcattagaagaacacgcaacagcctaggaggaaaaccatgggattatttgatcgtattaaaaaagcattctcagccgaaccagaaaaagaaacaccggttgaacaagaccaagcgataccggaaacaccggttgaatcagacgctacgccggttgaatcgcaaacccctgcagaaactgcggcagctgagaaaactgaaaccgatgaaccagccagtttagcaactgaagatgattcagaaacggtatcaccgcttgacacaccaacggcggcacccgtaaactcagaaccagaaccagaaccagaaccagaaccagaaccagaaccagaaccagaaccagaaccagaaccagaaccagaaccagaaccagaaccagaaccagaaccagttgaagcgtcggcagtaactgaagaatccgatgcgattgaagaagtgccggaaacagaagcagtaactggcgacatgcaagctgctgaaacgaagaagtatgatgatggattagaaaaatcccggctcacatttgggcaacgcttaaatgcgttgttcgctaactttagaagtgttgatgaagcctttttcgatgatgttgaagaaatgttaattgaagccgatgttggctacgaaacagcgatgaagattgctgacgaattacgtgacgaagtgaagttgcgtaacgttaagaaaccagaagcggtttcacaagcgattgttgaaaagctagttgatttgtacggtcaagaaggccaagcagaagataatcaattgcatttcgctccacaaggcgaattaactgtcttcttattcgttggtgtcaatggtgcagggaaaacaacctcaatcgggaagtttgcccaccaattagaaaaagcgggtaagaaggtcttattagcggctggtgatacctttagagcgggcgccatcgaacaattacaagaatggggtcgccgggataatgtccccgtggttgctagtgcagcagggagtgatccagcgtcagttgtctatgacgcggttaagcgcgctaaagaagaacaattcgatattttattagttgatacggccggtcgtttgcaaaacaacgtcaacttgatgaaggaattggaaaaagtgaaacgcatcatcacgcgtgaagtaccagctgcaccgcaagaagtattgttggtcttagatgcaacaaccggacaaaatgctttagtccaagctaaacaattcaagcaaacaaccgatgtgactgggattgtcttaaccaagctagatggttcggccaagggtgggattgttttagccgttcgcacagaattacacttaccagtgaagatggttggtctaggtgaacaaatgaacgacttacaactctttgatccaaaccgctttgtttatggcttattcaaggatattattgtcggtgatgggccacaaaaaacaactgatacagacgtcagtcaagcgattaaatagcaaaaaggctaggacaaataatttgttctagcctttttttagaagaaagagagattaacagatgaaaattgtgttagcaccagattcatttaaaaatgctgttaccgcaaaagaagcggctcgtgcaatgcggaaaggattcgaaaaaagcctaccaagcgcgtcctatgtcgaagtgccaatggcagatggcggcgaagggactgtcaaagcgcttgtcgatgcgaccaatggccggttcttaaccgcacaagtgcaaaatgcattggaccaaacggtatcagcacaatatggcatcttgggtgatggcaaaacggcggtgatcgagatggcagctgctagcgggattcagtatgttgatgcgcaaacgcaaaatccgttgataacaacgacttatggtaccggtcagttaatggcagccgcactagcacaaggtgtgcaaacaattgtgattggtttgggcggcagtgcgaccaatgatggcggtgctggaatggcacaagcacttggggtgcgtttgttagatgttgacggacaggtgttaccactgggcggtggggcgcttgcgcgtttagcacggatagatacgacgcatatgataccggcactatcaagggttaaggttgtgattgcatcagatgtcacaaatccgcttgtcggcccgaatggcgcatcagccgtgtttggtccacaaaaaggagcaaccccagcaatggtcgcgcaacttgatcggaatttaacgcactttgctgcggtgattgaacgtgatttagggaaatctgttgcgcaaataccaggtgcgggtgctgctggtggcttaggggctggtttattggcgtttacggatgcgcaggttcaacctggtgttgagatggtcgtgtggcgcaaactgggttaactgagattttccgagatgcggatatcgtcgtcactggggagggcggaatcgattttcagacacaatatggtaagacgccaattggagtcgccaaagcggttaaacaagttaatccacaggcgacggtgattgcgattgccggatatattggagcggggattgatgtgctttatgaattaggaattgacagtattttctgcacaacacctggcgcaatgtcattagcaaaagcaattgaagctactgaagttaatttaacgcaagtcagtgaaaatatcgcgcgattaatcgctaaacaacattagaaaagaggaccgacaaacgtgtcgatcctcttttttagcattaagctgttttggcttttggttcgcgtcccaaaatcacttgggcgataattaagacgacataggcgattaaaacgccacctagtagactgttggttgcggttgctttaaccaaccagtattcttgccaagcgtgattgttgaagacccaccagaataatagcccgaataataaggttaagatgtttaaaatggcgaagaaccaaagattaccattttccttgttctttaaatagacgactgagaagattaagttccaaatcccccaaccgattaatgcgaatataacgccccaatagataattgttgctgccatcatacaacctccatagaaattccaatttaagttatgaaaaagcttacagttctattttagcatgatttttcgtttataccagtgaaaagataattaatgcacaaacttctagttaaatcgcgcaataaaacgttgactaagcccgttaaaatcggtactctaatacttaggtcaaactaagtctaggaggcgtcaaatggaactcgcacaaaacgcacgcatgaattcgttgttcgaattttatggcgcacttttaacggcaaaacaacatagttatatctctttatattatggggatgatttttccctcggtgaaattgctgctgaatacaatgttagtcggcaagcggtctatgacaacattcgccggactgaaaaaatcttagagggttacgaagaaaagctacatctttaccgtaattatgaacagcaaaatgccagtgcagatacgctacaaaagtatattcaagcgcactatccagacgatcaagaactgatgcgcttgttggctgacttactgaatttaaccgaacaataattaacttaaaggactgataaaaaatggcatttgaagggctaacagaacgactacaaggcgcattgagtaagcttcggcgtaaagggaagattaccgaaacagacgtcaatcaagcgatgcgcgaaattcggctggcattattagaagccgacgttaactttaaagtggttaaagactttattaaagtcgtcaaggaacgcgccatcggggcagaagtccttgatagcttatcacctgcacaacaaattgtaaaaatcgttgatgaagaattaacgaagatgatgggtgaaacggctgtgccgttgaataaatcaccacatattccaacaatcattatgatggttgggttacaaggggccgggaaaacaaccacggccgggaaattagcaaaatatttaatccaaaacgaaaaagcacggccattgatgattgccgccgatgtttatcggccagctgcgattgaacaattgaagaccgtcggcaagcaagttgacgcacaagtctttgaaatggggacggatgtcaacccagttgaaatcgttcgtcaagggttagcacaagcggccttacaaaagaacgattacgtcttaattgatacggctggtcgtttacaaattgacgaagccttgatgcaagaattggctgatattaatgagctagcccatccaaatgaaatcctcttaacggtcgatgccatgactgggcaagccgctgtcgatgttgctgaaggctttaacagtcgtttagatgtcaccggggtcgtcctaaccaagttagatggcgatacacgtggtggggcagccctttcaattcgcgccgtcactggcaaaccaattaagttcactggtcaaggcgaaaaacttgatcaactcgacattttctatccagaccggatgagtagccgaatccttgggatgggtgacatgttgagcttgattgaaaaagcgcaacaagattatgacgagcaaaaagcagctgatatggctgaaaagatcaaagaaaatagctttgattttaacgatttcttggatcagatggatcaattgcagagcatgggacctttggaagatatcatgaagatgattccagggatggctaataacccacaactcaagaacatcaagatggatccgaaagacatggcgcatatgaaggccatcgttcaatcaatgacgccacaagaacgggaaaatcctgacttattgaatcctagtcgccgtcgtcgtttagcggctggtgctggtcgcccaatcgttgaagttaaccggatgatcaaacaattcaatcaatcgaaaaagatgatgaaccaaatgtcaaagggcaactttaacggcatggaaggtttaatgggcaacggtatcaagggtaaaatgggtaagatggccatgaattcaatgatgaaaaaacaaaagaaaaacaagaagaaacgtctcaaaaacgcgcgtcgttttaaatcttaaaaaaatttgtcctgtaaagaaaaaacactttacacggcgtttgaaatttggtatattatgacatgttaaagaattaataggaggtggcattaatgtcagttaaaattcgtatgaaacgtatgggttcaaagaaacgcccattctaccgtatcgttgttgcagattcacgttcaccacgtgatggtcgctttatccaacaagtaggttactacaatccattaacagaaccagttgacttgaagttagaagaagaagttatcatggattggttacaaaaaggcgcacaaccttctgatactgttcgtaatcttttatcaaaacaagggattatgcaaaaatatcacgaagcacgcttcgctaaaaagtagggattcgttatgacagacgtgaaggaactaattattgcaattgttcagccacttgtcgaacatccggaagacgtcaaattgactgaacatgagacagaacgttttatggaatttgacttacaggttaatccaagtgatatcggtcgcgtcattggcaagcagggacgggttgcacagtccatccgtaccattgtctatagtgtgaaagcaccataccaaaaacgggtccgtttaaatattgtagatgcctaacaaaaacgtttaaatgaagcagagatgttttatttaggcgttttttgtcgattaaggagaaattaaatgccagaaaaatactatcaagttggtaaaattgtcaatacccacggcatccgtggtgaagtgcgggtcattgcgacgactgactttacggattcacgatttaaaaaaggcgtgcaactggccgtcgaaatgcccaatggccttgttgatgttaaagtggcggcaatgcgccaacacaagcaattctatctattacagttcgaaggaatgggcaatatcaacgatgttgaacagttcaagggccataatttaaagattgctgcaagtcaacgcgaagatgatctggaagatgatgagttttactacggtgatattataggcttagaagtggttgaagaagccgatgggaccagctatgggaaagtctcagaaatcatcgatccaggtcccaacgatgtctgggtgatcaagcgccgcggccgttcagacttactcttaccatttttgaagtcagtcgttaagaaaattgatattgaagcgggtaaagcctacgttgaagtaccagaaggattgattgataatgaagattgatgtcttaagtttatttccagatatggttcaaaatgggttatcccaatcaattatcggtaaggcaattgatcgtgacttaattgatttagaagtgacggatttccgtgatttttcagtcaataaacacaattcggttgatgatgcgccgtatggtggaggtgcggggatgttgctccgaccacaaccgatttttgaggcgatggatcaagtgaatgccaagaatccggggcacaaacgggttattttgctcgatccagctggggtaacgtttaaccaaaaagttgccgaagaatttgctcaagaagaccacttggtttttatctgtgggcattacgagggctatgatgaacggattcgcacgctagtcactgatgaagtctcattgggcgatttcgtcgtcactggaggcgaattgggcgcaatggtgatgattgatgccatttcgcggcttgtacctggcgtcttggggaatgaacaatcagcggttacggattctttttcgaccggcttattggaacatccacaatatacgcgaccaccagaataccgcggtttaaaggtacctgaagtcttgatgaacgggaatcataagctcattaacgagtggcgcgagaagatgtccttgaaacggacatatgaacggcgtccagacttactagagaagatgacgttgaccaaggatcagttgcactggttacaagaaattaagcaagaagcggctgaaaaataaggcttttattctcagttgaattatgctaaaattaaaaattgtgatgattagtcacaaaataacggtattccgctggcgcaagacgttaatgaatatctgtggaaaaaggagagattcaaaatgaatccattaattcaagaaattactaagtctcaattacgttcagatattcctgacttccgtcctggggacaacgtacgtgttcacgtgcgtgttgtcgaaggtactcgcgaacgtatccaattattcgaaggtgttgttatcaaacgtcatggtgttggcgtgagtgaaacttacacagttcgtaaaatcagtagcggtgtgggtgtggaaagaactttcccattacactcaccacgtgttgctcaaatcgaagttactcgtcatggccgtgtacgtcgtgctaagttatactacttacgcgcattacgtggtaaggcagctcgtatcaaagaagctcgtcgttaagatgacattaaaaaaggccgactcattacgagttggtctttctttatgtggattacaaagttaggtgatgacagatgaatcaatggatctacgttgttttatatcaagcaaacccactttattatgataaaagtaaaatgatccgggcgtttagttcggaacaacgggcccaagaatatgtggcgttgctcaatgagacgccatatgcgaatcaatcactaaaagagggccattatacttatcaaaagttgaacttaaactaatctaataaatgccacttataaggcgcaatctgatgcttctgcggagtatgggattgtgcctttttgggttgtggcactttcttgagggtcattaggagtgcaagtagtggttctaataatagaataaagacggtaaatccaagaaatctagctacggcgtagaatgcttcaggcgcaagtgtgagttgattaaagaaccgttcgcagcggtggttgaaggcgtttaatttttgttcactgccatcacgatcgactgcgtggtggacctttggatgccgacaaacttcaaagcggattggatttttttgatgattgctagaaaagcgcatgcctttatcgaaaaagtaagggcttacaaaaggcagtaaacaaagtaccaataaagatagaatcgcagttaatcgtttcattactagaacctcttttgttttaatttcaaactaattataccataaattaagtgggttggcgcataaaaaaatagccctccgacgaggactaagcaggtgttcgataatggaaatgatagactttaaatgaaatgatcaagctaaccaccaacaagaaaagggcaactagtaatagattagggactaaaatcaagatgatgtaagcgacgattgcacataagtatgccagtaaaatcaaattctgatcgagtgataataaataagcaacaatatgcaaaataatagcaataatgcacaaccaccatactttcgccatggcatccatataagtggggatgaatttcgtaacgtgggggttaaccactagaatgatcaaagattgtaaaaccgttacaactaagaaaattaagttgaataaaaacggtagtttgcgataagaaatcttcatattaataaacctctatcatttaagattctttaagtataacgaatttttttataaaaagaaatatgattcaataaatttaataattggccaattaacagggagaattgcgttattagcttcggattgatacaatcaggttaatttaaaacgagtaggtgatttgatgaatagtatccatttaatttgtttaggtgttcaggatttaaccgtgtcacggcagttttaccaagcactcggctttcaagcgccgaatttagaaaatgctgagacaatcgtctttttcaataatactgggaccaagttggaattgtttccgtacactgcactactagccgatattggcttatccgcagataatcatccatttccaagaacgttcaacggcgtgacccatgcctttaatacgcatagtcaagcggaagtcgatgcaacatttaaaacagctctcgctaacggggccacgctcatcaaagcgccagaatggggcgagtggggtggctatagtggttatttcagtaatcccgatggttactattgggaagtcgcttactcaaaggactggcaatttgatcaagatgggatggtggtgatcgaatagaatgtgggcgcacgtaggtttttttgcgttttacgctgttcagttctttagaagtctgttataatgaataacgttctggagagttggcagagtggtaatgcaacggactcgaaatccgtcgaaccggcttataccggcgcgcaggttcaaatcctgtactctccttaaataagcgattttagaacacttttaagtgttctatttttttgtcttaaagtgctaaaaatgttgatacaaaagggataaggaagatttttttatttaaataataagttgggagaaatcagcatgattcaaaccgtaacagaacagaacatcgcaagctttgttcaaacacaaccgttagtgattttagacttttgggcggattggtgtgcaccttgtcggattatgacaccgatgattactgaattacatgaacaattagctgatcagtttggcttaggaaccgttgatgtagaggatcaagcagcgttagctgaacaatatgcgattcaatccgttccaaccctattaatcttcaaaaatggtcaggcgacagaaaaggtaactggcgcttttccaaaagagaagttaaaaagatacttagataagaaaatcgctgaaatgtaatcagcgcattaatagtagcccgcaactttcattggagagttgcgggtcttttttgataagtagaaataaaataacccccttagctattgtctaagggggagatgattattgacgaaccatgtggataacacgttgataaaggattaatgcgccaatctcacaaagtaaaatcaaaacagctaatggaagataggtataactgcccatcacgccaactaatggggaaagaaaaatgccgaaaacatacatgccaagtccaagcactgaagaagcaatccctgcatgttgtccttggcgttgtaaggccagtgaggtgacaacggcattaattagaccaagtgttgcgaccactaggaataaaccaattaaagctaaccagagacgattagagccaaagccactaattaagacgcagatggcaccgattaaaccaccaattaagccgatttttaattgttgtaattcatcaaaccaatggattaaaatggtggacatttcagccattaagataatcccaatcccattgattccgtagattagactgaaagttgatttagaaagactaaagacattttgaagcatgaaactggaacctgaaatataacagaacattgccccataaacgaggccttgaattaaaacaaataggatgaatgggcgatctttaaaaatggcttgaataccaaggcgcgattgttgtgccgattgcgcgcttgtggatactgtgtgtgtttctttgaatcccaaaatgatgcctaacaatagaagaaggccaacaatccctaaaaagccgaaaatgccttcccaagaggtgaaacggagcaaagcacttcctattaatggtgaaatgatggggaagataccgttgattgccatgagtaaggcaatgaattttgtcaattgtttaccgtcaaataaatctttagcgactgctcgagtaatgacctgtcctgcagagctcgctaacccttgaataaaccgtaaaaggaagaatagccaaatattgtgggtgactaacgataatagacacgctgtaaaagcaagggcggttccgattacgagtggctttttacggccaacacgatcgctccaggcacccatgaagatggggccaatcgcaagtccagccaaacacatggttagactcagttgaatcatggaagcagatgaatgaaaatcagcttccataatcggaaatgctggtagatacatatccactagtaggggtccataagcactcagtgaaccaagtaaaacagataaccatagtgttcttttttttgttaaaaccatgttaataaaccctcctaaataaaaaagtgtaaaaaaatagcccgttgaaaacgtagctagcgccgaacgaatttaattaattactattcatgttgcttcttagttacactaacataagaagtcgggtttgtggcgatatatgagcaatttttaatatgtaaatggtttctatttcagtttaaacaagttatgatggagataatgaaaaaagttgtcgaatgaggttttgccatgaaaattgcccaaaaaaataaaatattagaaacctgcctaattgcgggacggattatgattgaaagtggttctgaaatgtaccgggttgaagatacaatgaaccggattgcttataatgcaggcattcaaaagagtgttgtgtttacgacaccgaccggtttatttatcggaattgaaaatcaaccttatgtgcaactaggcgctgttgcggtgcggacgattaaccttggaaaagttgaaaatgtgaatactgcttcacggcaatttgcgactaaggaaattacgttggatcagttaatgttacggttaaaacaaattgatcaggatacagctcattttccgttgtggttacaaattacagctgcagcagtcatttcagcgtttttgatgattattttttctggtgaatatgattggttagacatcataccgtcagcggtagccggtgctttaggctatgccgcctttgcggcggtcaatcgggtcacaacgattcgctttatcggtgaatttttaagtgcgacagtgattgggatagtcgcctatctattaactaggtggcacttaggagtcgatatcgataatattatcattggggctgtaatgccattggtacctggtgtagcgattaccaattcgattcgagatttgctagcagggcatttattatctggtatggcacgtgggatggaggccatcctgagtgcctttgcaattggaacggggattgcgctcgtatttagattctttatgtaaagagaggttcatcagatgccatattgggttcagtttattattcaagcgttatttagttatatttcaacggttgcgtttggaatttgtattaatttaccaagacgcgcattattatggtgtggctttgccggtatggcagggtggcaggtctattggatgctctttaactttggtagcgggcggatgcttgctaatttgttgggtgcgttagctgttgggatttgtggcaatattatggcccgttataagcggatgccggtgattatctttaatattccagggttagtgcccttagtgcccggcggaactgcgtatcgtgcgattcgaaacctcgtgctaggcaacttaaatgaagcttcgacacaaggtgttgcagtgatcatgattgctggtgcgattgccgttggctttatgttagcgcaaattttagccgatataacacgcaaacgagcgattacgccgaaatgggtatcgcgtcactaaaaagtatgctataataaggttatgcgatgagtcgagtaagtctcggtaggcaactattctgcgaaggcagctaggagacccaaagatacaggataccacggttattcatttaaccacttgccgtattgcaagggtgttttcgcccgctgtgttgtggagcacaaggtgtttattcttcggaatactgtaaaaaaagccccttccgtcaggaaggggcttttttttgtgcgttcattttcttgcatgacagcgttactgatggtgcgatggtcgactaattcaccaatccgttttagatgtttgagatgtgcatcgtagtgttccgaaaaaacgagcgcgtataaaacatttaataggaagatgatggaggtattaatggtaaagttgccgattttcgagtagagtttttcgcgggttgtaatcggtaaaaagcaagtgcattcttgcgaaagtcgattttcaccgatactggtaatcgcaatcgtcgggatgttgcgggcgcgtaaaatagtgttaagtgctagtaagttgggattctcgccagaataggaaattaaaatcgcacaagcatccggactaagattataggcatcgtagttttcctcgccacgaaccgcagatagcgtaacgtttttttggatacgattcattttgagggcaaaatcttgcgcgatgagtaagtttgagttttgggagaagatttgaatatgatttgccttgaggagcaatgatttagcttgactcagatggtcgtggtcgagtaaaaagaagatatcatcaatcgtcattttgtccaagaccgccattttcttacaaatagtcatcaaactatccgtactcgaaaagggcagattgggatcgatacgcgtaaaatgtttattgaggtagcgccactcttctagatagtgtttcttaaaagatttccaaccgtcaaaatggagttttttggcaatgcggaccagagtggacggttgcgtataggtttgagcagcaatttcttggatggaaagctgatcgagtgcttctggagccgttaacaagtaatccacaaccacggtttcagcgggggaaaacgcgaatgtctctagtttttctttaattaacatgtaaccgcctccttttacaaaagattagcgatatttgtaaaataagtcaatcgataccctagtgatttgtaaattaaattcgcgtttaggccattaatatcggcagtttatgcgaactcacttttaaacgagggcatagaggtggggtttgcggtttgcgttaggtatgcttaatttgtaaacaaatcaaaggaggcattcagatgacacggaaagtaaaaattgcaacgattggtggcggtagtagttacacgccagaattgatggaggggtttattaagcgctatgcggaattaccaattggtgaaatctggttagtagatgttgaagcaggcgattgtcggaaaaatggcgcaacgaatgtgggatgcgtccccgtatgatgttcagattcatacgaccttgaatcgtgaagaagcgcttaaagacgccgattttgtgaccacgcaatttcgtgtcggccaactggatgcacgggtgaaggacgaacgcattccattttcatacggtctattggggcaagaaactaatggcgctggtgggatgtttaaagcatttcgaaccattcccgttattttagaaattgttgcagatatgaagcgcctctgtcctgacgcatggttaattaattttactaacccaagtggcatggttaccgaggcagttttaagatacggttaatgggaaaaggtgattgtttgtgtaatgtgccggtcgccgctaagatgggagaggctgaaacgttaggtgtgccacagacggatttaatctataaatttgcaggggttaatcactttcactggcataaagtagccgataaaaaaggtcatgatttaacgccgcaattgattgataaattatatgaagaaaatagcgggttaccgaaaaatatttttgatgttcctttctatcgggaacagttacagcaaatgaacatgatcccgtgtggctatcatcgttattactatcgtgctgaagaaatgttaaagcatggtttaacagaatatgcgactgaaggtacgcatgcgcagcaggtgaaagtcattgaatacgaattgttcgagttgtataaagaccctgatttagattacaaacctaaacaacttgaacaacgtgggggtgcttattattcagatgcagcctgtgaaacgattgcgtcgatctatgcgaataagaatacagaaattgtggtttcaacgcgaaataacggggcagtccctgatttgccagcggattgtgcggttgaagtgacggcctatgttggtggggctggtgcgcggaatgttgcgtttggaccattgccaacagcagaacgtggttggttacagatgatgaaatcaatggaattgttaaccattgaagctgcgataacgggtgattatggcacagctttacaagcctttattagccatccattggtgccatccggtgaaaccgcaacgcgcgtcatgcatgaactactgattgcgcataaggcttacttacctcagtttgcagacactattgcacggttggaaaaagaaggcataacgattaaggatgaagtggttcgaaagatgtagtgatcatccaaaaaaggattggcgagcagcgaatcctttttttaatcccttaaaaggcgctataatctgtaaagattgatagaatggtagcaaggggcggttagtaaatgtttgaacttgaaaaaatccagcagttgaatacattggagctatcagttttaaagtatgttttaaatcatcgcgcacaggtcgaaaaaatgacgattcgtcagttggcgacccgagcgcatgtatcgacgtcaacaatctcgcggttttgtgagaagctagggtcgaggggttttcggaattcaagtatatgctaaagcaagagcggttggcgcaaaaaaagacatcgatgcctgaatatgatgtcatgttgccaattaccgagtttttggataaaacgaataacgaaacgttcagacagcttttatcacaagcaacggcattaattttagaggtacaagctgtctttttctttgggatcggcactagtggtgccctggctcagtatggttcgcgttatcttgccaacgctggtattttctcgctgagcatcaatgatccatttacaccggtggggatgcgagaaacagtcgtggcggataccttattagtggtgctctcggtgtcgggggaaacaactgaaatgctggcacaagttgagcaatatcaagcaggaaaaggcaaagtattggcaattaccaacagtacgcattcgactttagcgcggttagcggacgttgtgattccgtattatatgcctgaagaaaagaatggttccttgaataatacgacgcagataccggtggtttatattctagagttgctagcacatcgggttgcttgcgttcagtaagtgttgtttgaaacatgttatttttaagaaacaaataccaatcagtggtgcatgtgtttatcaccgttaaaggactagtcgcccagatggcaaagcgctatactgcaattatggaagcgcattctgaggcggtgatgttgatcaatcgccgtgattaaatagcgaagggaagttaaacacatgaatacttggattaatactaaattaatgccacctattatgaagtttgttgcgacgcggccgattacagcgttgaaaaatgggatgctatacgtgatgccatttacaatcgttggatcgattttcttaattttagccaacttgcctgttaagagttgggccgattggatggtttcaactggtttgaccccatattggaacgttgcctataacgcatcgtttgcaattatggcgttaatcgccgttgcggggattgcttattcttgggttcaggatgaaggttttgatccgtttccagcctcattacttgctattgtttgtttctttcttattagtgacgcgcccaagcactgccattgtttcggcatccggtaagattgttgtctctgttaaaatgatgagtcaacaaaccgggtttattgatcggacttggcttggtggacaagggatgattactgccattattgtcggtttactagtcggttggatttactcagctttcttaaaacatgatattcggattaaattaccagaacaagtgcctgcgaacgttgcaggttcctttaccgctttgattccagctgctgttttaattagtggctcactcttggtttatatcttcttcgacaaggttgcaaactcaaccttaacagaatcaatttacaataccattcaagcaccacttcaaggaattaccgattcatttggtggcatgttagccatttctttcttagtaccattcttgtggttcttcggggtgcatggttcaacaattgttggtgggattatggggcctttattgcaagccaactcactggctaaccaaaaaatcttgggttcaggcaaagcattaacgttagctaacggtggttacattgtgacgcaacaattacttgatcaatttatgacagttaccggtgctgggatgacaattgggattgttgtttacatggcattctttgccaaatcagcacaattcaaaaatttagggaaattatcattagcaccagcagtctttaatattaatgaaccgattttatttgctacaccaatcgtgatgaacccgattatgatggtgccattcttcgtgacaccaatgctatcagcaatcttaacgtggactgcgattcgggtcggtttaatcccaatgttccccggaacgttggtaccatggacgacaccaccaatcatttctgggttattagtgggtggttggaagactgcattgtggcaagccttaatgttattaatgacgttctttacgtacttaccatttattcggaaacaagatcacttgaactatgcttcagaacaaggtgcaacaactaaatagggggaaaggtcaacatgggacaacttagaaaagattttttatggggcggcgcagtggctgctcatcaattggaaggcgcttggcaagcggatggcaaagggattagtgttgatgtgatgactgccggggatgttaatcatcaacgggggattacagatggtgtacaaccggggcacaattatccgaaccacgaagtcattgatttctatcatcgttatccagaagatattaagttatttgccgaaatggggttcaagagctttagaacatccattgcatggacgcggattctttcgaatggggatgaagcacaaccccaacgaagccggccttaaattctatgatgacctatttgacgaatgtctcaaatatcatattcaaccagttgtaacgctcttgcattttgaaatgccatatcacttggtcacggaatacggtggttggcgtaatcgcaaagtcatcgactttttcttgaactttgctgaaacggtcttcaaacggtatcgtaataaagtgaagtactggatgacgttcaatgaaattaataatcaagccaattaccacagccagtttgccttatttacaaattctgggttacagattcaacctggtgaagatgctgaaaaagtgatgtatcaagccgcccactacgaattagtcgcgagtgcaaaagctgtacaaattggcaagcaaatcaatcctgatttcgaaatcggctgcatgattgcgatgtgtcccatctatccactgacagctaaaccagaggatgtgctcaaggcagaacgcgcaatgcaaacccgttattggtttgctgacgtacactgtcatgggcgctacccagaatggctcttacaatatcaaaagaaccaacactacgatttggacattaccgcagatgatttgaaagaattggctgcagggacagttgattacatcggcttcagttactacatgtcatttgcaaccaaggacaaaggtgaaacaacacttcattatgatgaagaacacgatttagtgcctaatccatatgtcaaggcatcggaatggggctggcaagttgatccagttggcctacgttatgtaatgaactggttcaatgatcactatcacttaccagaatttatcgtggaaaatgggtttggtgctgttgatcacgttgaagcagacggccaaattcacgatccttatcggattgattatttacgcgaccacattgttcagatgaaaaaagccgtggaagatgacggtgttgatttgatgggctatacgccatggggctgtatcgatttagtttcagcaggcaccggacaaatgtcgaagcggtatgggtttatctatgttgataaaaatgacgacggaacggggacgttagctcgttctaagaaggactctttctattggttccaaaaggtaatcgccaccaatggggatgacctagcataatcatgaatagcgacgcaggcaaattgattttgtctgcgcctttttttgttgaaagaagcccatgcattattaataacccatttttctgaaataaaactgttattttatcgtgagttaacattaggcaattaccattatgaaataaattatgagaattagggcttatctaatgcaaaaataatcactatcgtttacaataagtaagtattaaaaatggaatggggtaaagaaatgacaattacatatgtcgtcatcaacatcgtgatcatgctcatcatgttatttgttttaaacaagatggcccggattcacgttaagtttagtcgccgcgttttcacggcattgggggtcgggattttattcggcgcactcttacagattatcttcaaagcagattcaacggttgtcaaacaaacagctgattgggtcggcattgtcggcaacggttatgtctcgttcttaaagatgatcgttatgccgttagtcatggtttcgattattcaagccattacgaacttggaatcatctaagggcttagggaagatggccggcatggtcattggaatcttagtctttacaaccttaatcgcagccacagttggttcagtgacagcggatgttttcggcttaaatgcgagtgatattcaatcaggccaagtcgaaaaggcgcgctcgaaagaattacaaacgaagctaggcgatgtacaggaacaaactgttcctgaaaaaatcgttagcttcattcctgaaaatccattcatggatatgacgggttcacgacctacatcaacattagctgttgtgattttctcagctttcttaggagtggcagcattacaattacggcgtaaaaagccggaacaagcagaaatgtttaataaaatcgttaacgccttgtacacggttatcatgcgcatggtaactttaattttacggatgacaccttatggggtgttagccttaatgacaacgaccgtagcacaaactaatgttaaaggaattctcagtctaggtgagttcgtgattgcctcttacgtggcattaatcatcatgttcttgattcacttcctattaatcacgttcactgggttaaatccaatcaactacattaaaaaagtgattccaacgttaatttttgcgtttacgtcacggacgagtgcgggttcaattccaatgaacattgaaacccaaacgaaacgtttaggggttgaagatgggattgctaacttatcggcttcatttggggcttcaatcggtcaaaacggctgtgcgggtgtttatccagcaatgttagctgtgatgattgcaccaactgttgggattaatccttggagcatcggtttcttggttaaattaatcttgattgttgcaatcagttcctttggggttgctggtgtcggtggtggcgcaacatttgccgctttaatcgtgctttcttcaatgaacttaccagtcgggttagccggactattaatctcagttgaaccattaatcgatatgggtcggacagccttgaacgttgatggctcaatgactgccggggttttaacggctcacttattaggtaaactggataagaacaagtttaatgatatgagtttgacggaagattcagacgaaatggcttaatttcaaaaaaatggagggtttagtgatgcgaacgattattatcggtgccacagctgccggaacaagtgcagctgcgaaagcaaaaagaacgaatccagatttagacattacgttatacgaaaaacgggactatgtgtcctttggggcttgtggcttaccttattttgttggcgagcactttgaagatcccaaccaaatgattgcccggacacctgaaaaatttgctcaacaaggtattgatattgcgcttgaacacgaagtactatcagttgactttgatgcgcaaacaatcgtggttcgggatttgaaaaccaatcaagatcgcacagaatcttatgatcaattaatgttagcaacgggagccacagctgtgatgccaccgattaaaaatgttgatctaaaaaacgtctatcatctacggacgatggcagatggacaagccttacgtgaattaggacaagacccaaaggttcaatctgtaacggtgattggtgcgggctttatcgggttagaaattgccgaagagttccatcaattagggaagcaagtccgggtcattcaactagaagaccgaattttaccactggcttttgatccagaactaacggacatgttcgcggatgacttatgtgataacggcattgaattacacttatcagaagctgttcaagccttagaaggaactgttcaggtgactggcattgtgactgataaggggcagtatgcgacagacttagtgattgtagcagctgggattcggcctaatacgcaattcatcacggatgatcgattgaagaagttgccaaatggtgcgattattgtcgatcaagcagggcggacatcgattgaaaatgtctatgccgctggcgataatgcaacggtcattaacagcgtgacgaaccaaccgatgtattcagcacttgccactggtgccaataaattaggccgaattgtcggcacgaatttaggcgggcaagccgctcaattaccagggatgttgaattcagccggtgtgaaattaatcacgctagaagcgggccgaacaggtttgactgaaaaagaagcggcagaggctggtattgatttcagtactgttttaatccacgacaagaaccaaacgaattattatccaggccaatcagatttaacgattaaattgatttacaccaaagcagagcatatcttaattggtggccaggtggttggtcaaaaagacgcagtgttgcgcgttgatgtactcgcaactgcgatccaagcgaagatgacaactgaacaactcgggttactcgaccttgtttatgcaccaccgtttgcaagaacgtgggatgcactgaatgtggccggcaatgttgcccattaattaaaaaaaagtgacaccgcacaaaccgtgtagtggcgctttttttgttgcatgcttaaacagttgttcatagtgtttacttgaatgtttactcgggtctgtgctaaaattgcatttagaaattaaatttttgcaaagttagttatgaattaattacgatgattaagaaaacacaaataaaaaatttatcgacaggagacagtttaatgaacaacacaaagagtttgattgcattgagttctggaattttaggggcagctgggatcggtttattgagtgcagggcaagtacaagcagcaacgacagcaaccgtcaactacgcagatggtgcaacaactgtttggacaagtccaacaactggtcaaactgctaaacgatacatctttaagggccaatcagtaaatcttttagcatcacaaaagattggtgctgaaacatggtaccgaattgggaacggcgaatgggtacctgaacgttacttaacaaccagtgacgctacaccagctgaaacaacaccagcaacagaagcacctgctgctcaaaagacagctcggattgcctatgccggtggcgcaacaactgtttggtcaacagcaacttatacagccccaacaggccaatacttaggttatggtcaaaccgtcaacgttgtgaaaacagaaactgtttctggcgaagaatggtatcaacttgaaaatggcagctgggtaccagctcgctttacaggtgatggtaagattgaagccacaccagcgcccgttgcacaaccggtagcaccagcacaacctgcaacagcgactcctgtcgaaacaccagctgcgccagcaccagttgcaacaacaccagcgcaaacagaaagcacgcctacaacaccagcacctgtcgcagaaagtgaatcaacaccagttgaaacgcctgccacactagaaagtacaccagctgtagcagaaagtagtgcgcctgctcaagcagaaagtacaactcaaacacaacaaccagctactcaagaatcatcagctcctgtccaagaaactgcaccagttgaaacaacaccagccccaactcaaaaggcaccagttgtaacgacaccaacaccagccccaacggcacctgcagcaacgactggtaatgcgcaagctgttattaatttagcgatggctcaaattggtaaaccttacgtttggggtgcccatggtccaagtagttttgactgttctggattaatggactatgtcttcagaaatgctgctggtaagagtatcggtggttggacagtccctcaagaaagtgccggttatgctgtttcattaagcaacttgcaacctggcgatttattattctggggttcacaaggtagctcacaccacgttgcgctatacattggtggcggacaatatattcatgccccacaacctggcgaaaacgttaagatcggttcaatgcaatactatgcaccaagttttgcacgccgtgtcttttaatgattgcaattaagcgaacatctcacctaggtgggatgttttttgtattttagccctaaataagctatgatatgtagagatttaaaaaaggactgacgagatgaagatagaagtacaagcatttatcaatcaaattcaagatcaaacatatttaacggatgaatacgagctccccacgccagatccttttgtggcggacggtattttggcacagttaaaacccgctattgataaagccattgaaaaacaagctttggcctctttttcggtgctgacagaatatgctggcgaacccgttaaggtgacattggaaacggggattgtgaatctaccattacaatacattaaaaaagtaaatcaattttttgaactcgacgaccaagcagaggtgaatctttatttatatgtgacatcgccactcattaatcgctcgaacatgcggattgacttaattgggacggtagcttcgtttgaagaatcggcagctgctaattggacgaagattgccgacttgctaacaaaggacttggaagccgtcgtaatcggttcacaggcgcctaaagaagaaccagtcgaaaagaaggcgcccgctaagaagaaagccgcacctaagaaaatggcaacgactaagaaaaaagcgcctgccaagaagacaacagctaaaaagacagctacccaaaaaacaacgactaagaaaacaaccaccaaaaaaaagactacgaaaaaagcagactaatttagtctgcttttttgatggcgtctattaaaggcaagtcgccgttaacaaacgagaatttcttgtggattgtttcggtcggatgttctaagacggtgcaaatcatcgcagcgacatcagcacgtgcaacttgtccaccagatggttgcattgtcactaggccggtagcttcgtcgtttgtaagtgtcccaggacgcaagatggtccaatctaaaccagagaattcaagccagtgatcggcatagtattttgcagcgtagtacggtttaatactttcaggccatttagttcgatcctcaacaaaaagtgcactgaccatgacgtagcgactaacttcagcaatcttagctgctgccatactcttaacggcgccatcgagatcaaccaacagtgtttgatcatcgcctgttttaccgccagaaccagctgtaaagacaatcgcatcatgatcggcaaatagtggtgctaaagccttaggttgtttggttaaatcgaataagacaggcgtggcccctagttgtgcaagttcatccgcctgttgttcgacacgaatgccggctgtaacggtgtgaccggcagcaacgagttggctaattaggagctggccaacgttaccatgggcgccaataacaaaaatccgcatagtaaaacctccaatataaatgtgtgtgctgtccattatagtagttattgaacagtgacgcaaagatagtggatttaaaaacctgtgttgtagtacaataaaattcggcaccttgcgaaaaaatgagtgtgctttagggtatataatcttgaaagtggctgatggcaacctttaaataggcaaagctaattgtgggattcgttttagaaataaatctaagaatcctctcattttttcacaaagttgcttattagaatatcatgaagccgtgtttgttttgtgttatggtacagatatagagattgtgatttattggataagtagtcctatttgttaatgctatctcagaaagtaggaggagaacatgacaaatcaatatcggagcgtttttgatatcattggaccgattatgattggtccttcaagttcacatactgctggcgcagttgccattggacatgttgctaatcgtctttttcatgcaccgattaacaaagttattgtgcgttactacgaatcttttgcacaaacccaccaagggcatggtaccgattatgcaattattagtggcgtgctaggattcgatccggctgatcaaagggtaccaatggcagttgatttagcgcgacgtcaaggtattgacgttgtcttcattgaagatccagggaatagtccggtgcaccatcccaatacagcggaattaacgttaatcaatcgtgagaaggaactaacgatttggggctgttcaattgggggcgggaccatcgaaatccgccaagtcaatttgaatggcattgtgattaaaacggatggcccgttaccattggtttttgtcgaatcggaacaagaaatcggcgatgctttagaccagatatttgaaggcaactatcgtgataagcgcatatcggttaaagtgccagatcggtttttgtataaaatcgaactgattgataagccgtacccggaacagattgaacaggtccgcggaatgagccaagacgttattgtgttatagaaagtggtgggaagatgtatacaacaattcacgaattagtcgagacagcgcaagaacggcaactaccaatctcggaattgattatcgaacaagaggttgcgatgagtcacactagtcgtgaagtcatttgggcaaccatggggaaaaacttggatgtcatgattgcggccgaagaaaaaggcgtgaccggtgaaggtgttcagtctgccactgggattacaggtggtgaagcggttctgttgaagcggtatcgggaaaagggaaagtcgttatcaggtgatgtgatgttgaccgctatgcaaaatgcggtagctaccaatgaagtcaatgcttcaatgggaatcatttgtgcgacgccaactgctggttcagcaggtactttacccggtgttttgtctgttattactgagcgcttggcgcttgatcgggatgcgcagattcggttcttgttttgtgcgtcagcctttgggatgattgttgccaataaggcgatgattgccggggcaactggaggctgccaagccgaagtggggagtgctgccgcgatgggcgccgccgctgcagttgaagctgctggtggcacaccacaacaatcgtcggaagcattcgcgatggcgatgtctaatctattgggattggtttgtgatcccgttgctggattagttgagataccatgtgttaaacgaaacgtgattggggccgtcgatgccttgaccagtgctgatatggcattggcagggctaatcagcaagattccagctgatgaagtgattggtgccatgaaacgaatcggtgaagatatgccatctacattacgtgaaactggtttaggtggattagctgctacaccaaccggggttgcattgaagatgcaaatctttggtaaggataagagccttaaataaaagcgacttttaggaggaacaattatgcaaaagaaactttcaaaatccgcatacggcggtgtttcaggtgagaaatatgtaccgtatgtcaaccaaggcgacaaaaaggtcggcaacttagcgattctaataatggggagcattttagccattatttttgctgcttcaacagcttattctgggatgaaggccggtttaaccgttgcagccgggattccaggttcaattattgggtctgggttagtcggtgcctttgccaaatcaaaagggattttaggcaagaatattatgcaagggatgtccagtggtggtgaatcaatcgccagtgggatgatttatgttttaccagctattattttaattggtggccacatcaacttcattcaaggggtcatcgttggggtgctcgcaattcttttttcaatggggacagcctcattagtgcacaactacttaatggttgaagaacatggtaagttggtttatccagaagccatggcgatttcagaaaccttagttgcgtcagatactggtggcgattcgcttaaatacatgggtgttggctttggtatcggtgggattattacgatgctaacttcatcagtgtttggtgtcgtcaacaacatgattagctacgttggttcatcattttataaatggaaattagacgttgaagtgaatccattacttgcaggaattggttttatcgttggattagaagtgtcattaacaatgtttgcaggtgcgattttatccaactttgcgattgcaccgttaatcggttatttcacagatatggcgggcaacagtgcgcatgtttggaataacacgagtttagccgtgaatcaaatggccgttaacgatttatcaagttcatacgttaaatacattggtgccggaatgatgctttgtggtggtttaatcggtgcgattaaattaatcccaaccatcgtgacgtcaatcaagaaaacactagctgccaaaaacgtagcaggcgaagaaaagaatacgcttggtatgattgccattgttgttggtggtgttgggatcttcgttattggtattatcattgcgcaaaacttcttaatggggattgttggtgcattactagcagccatcttaagtttactctttgtcattgtttcggcccgggttgctgggacgattggttgttctaacttgcctgtatcagggatgacaattgcgtcattagtgattatgacggtagtcttcgtattatttggttggacggacaataaccatacgcaaatcttattaatgttcgggacattcgttgtgaccgccgttgctgttggtggtggctacatgcaatctcaaaaagtaacatatgtcattggtggttcaaaatctgaaatgatgaaatatttcatgattgccgggattgtcggcgtaatcgtaactgtcggcacaatcagcatcttatcaccacaattcgttacagatagtgcaacaccagcctttgggttgccacaagcgaacttaattgctacattaacatctgggattatgacgggtaaattaccatggatcatgattatcgttggggttgtgatggcattagctttctacttcttagatttaccaatcatgaccgttgcaattggtttttacttaccaatttcaaccacttcaatcatcttgatcggtgctttgattaaagtctttattgaaaaagcaacgcgtgatgaagcgattaagaataatcgggttcaaagtgggattagtttatcatccggtttaattgctggtggttcaattattggtttaatcgggattattctccacgtaaccggtgtgttaaaagaccgcgtgattactggttttgcgaataccaatgcaatggggattatcttattggttgtcatggttgtttcgattactgtgccacttatgatgattcataaaggaggggcaacagaagatgggacgacagaaagcggagattgatttagaacaactcatctatgaaaaaaatccgcaagttcagtttaagttacaagctggccaggtcaccattattcggccgcagaatcactggattcaacggacattacggcgtttgcatgtgaagattccgctagaaacacagctggaacttgatgattatggtagttttgtctttaggcatgtgaatggaaaacgcagtgtccaccagattggccaagcactggcaggacagtatgatgaagccggtgaatacctgtatgaacgattactcgtgtatttgaatcatctagaacacacagaacatttgatccggcgggtaaccgactaagttttattaatcaattagtgaatcacatttttaacgagtttcaaaggtcgatgacagtgggctcgattagcttcgtacttagcttgtgctgtttctggtgagtatacagcgtaatattggcgttgaccattcactttttttacttggtcgatctcgccgcggcacaattcattattgattgtttgatgacaaacattaagcgctctggcaattgcacgattggaatagccttggctgtgcagcgtagcaattctgcctcgtttaaacgaagttaggtgctgacctttttttctgactgtggtattctgttcttgcatcaagacaataacctctttcattgtttgtgtaggaacatcaatgataacagagatttgtcttggtgttttttattttatcaattagctaaaagtatttggctaacttgattataaaacgcgcgaataaaaatctatcaaaatgctgtcttgaaaaagtatcaggaccggttatatttgaaagacgtcaatgggcaacatcgaaaattgaaaggcgtcaaattacaggaaatattgatgatgtattgctgattgttgatagggacattgtggaagtatatacaatggatgggcttcaagtaatgactggcagagtgttctaaagtaagtaaatggtttcttagcacaggaaaaatatagagtattgtaaattaatagttaatcaattgttctttaatctcccaccctaaatatggtacgcttatgttagtttgaacgaggacgtgagtgggatgcagaaaaaagcactttttaaaaatggtctcgggattatcattggcgccttgatttatgcggtggcgattaatgatttcctgattcctcatcatattggtgaaggtggcgtgactggcttaacggcgattggctactatgcgttagcaattccgccagctgctacgaatttggttctaaacggtttattagtgattgtcggctttaagtatttagagaagcaaaccatctggtattcggtctgggcggtactctggatttctatcttcttgcggctcccgcattttatcggctaccatacgacacagacgatcattccgacgataattggtggcgtcttgatggggattgcaatggcgattattattcattgccaagggacgattgctggtagtacgatcttagcgaagattgccaatcgctatttagggatccaaaacggctctgcgatgcttttttttgatttaattgttgccattccatccggcttcattatcggcttccaaaatatgctcttaacgattattgaattgtatttatcagcagtcgttttgaataaattattggctaaatttggggcaaaacgcgcggtgacgattatttcggatcaatatgcaacgattgcccaaacattgtcgacgcaattccaccaaggcatcacgatcattaaagcgcaagggtactatagtcaaaatgaccggccgatgctgtatgtcatttgtacggccaaacaactcgcgacgctcgtaccggtggtctcaacgattgacaagcaggcgctagtagtagtcgaagaagtccgcagtgtccaagcagaacaattgaaacagcttctttagaaacaccgtggttgaccatggtgttttttactcgctaaaattagttttatatagtaagatataattaatgctgatataaaaacaatttaggagtggacgggatgaaaaccaaaaagggtggttatttaactttgaagattcgcttattaaatacccgactttttaatcgttatttaacggctgatccacgcgcgtgctataacgctgaacaggggaaaattttgtcagcattgtgggatcatcatccgcaaactgctacggaattggcacaagtgactggcttagccaatagtagtttatcgttgatgttacggcgcttagaagaacagggattattgatgagtgagcaatcgccacttgataagcgcaagcgggtctttgacttaactgaacaaggcgctaatcagcaacaggtcggtgatgacgttagtcaacgattgagcgccgttttttacaagggcttttcggatgctgaagtggcagctgttgacggctatttagaacgaattttagcgaatttagaagcagaggcggccgtttttaaccgtcaagcaaaaggggagcgaaccaataatgacaattgaacaaccaacgtagattgaagtgcgtggcgggaacgtcaataacttgaaaaatattaacgtcgatattccgttgaaccaatttgtggcgatttcgggaccgtctggttcaggaaaaagttcgcttgcgatggggattttatatgcagaaggctcacggcgttatttagaggcgttgtcgacgtacacgcggcgccgaatcacgcagaataaacgctcacaagtccaagaagtgcggcatattccatcagcgattgcacttcggcaacgaccaagtatgccatcagaacggccaactgttggttcgatgagtgagatttttaatgtcgtcagattgattttttcacggttagggacgacacgttgtccaaatgggcacgtgattcaaccaagtctaaaaattgcccaagcgatggacttagctggcgataaaatggggattattacgtgccctacttgccaagtgcagtttatggctaaatcggccgaagactttgcctttaattcagctggcgcctgcccagaatgtcatgggacggggcagattcaaacgttagatgatcgcaaaatcatcgcggatgaaaatctcagtattgaagacggagcgattgcctcatggcgattgccgggccggaatttcatgccaaccgttgctgcccacattggggtccgaattgatgtcccttacaaggacttgacggccaaggaaaaagaaattgtcctgcatggtaaacgggcgaagtatgcggttgatttccatacctcaacgggccgtgtgtttagtacggagaataccctctatgaaaatgcttatgacgctgtttatgaatcgctaaaatcggttaaaagtgatcgggcaatggctaaagtcaattcatttttccatttttcaacctgtccaacgtgtcatgggacccggttaaatccggcattactgacccaaacagttggcggacaaaacattgcagcagtttctaatttgacgttaggcgcattagaagattgggtgcgtgctactaaggccgacttaccggatgaaatgcagcaaatggcgacaattttatttaagaacctattaggaacactgcaaccgttactagaattagggttggattatttaacgttgtcgcgcaatgggaatacattgtcgactggcgagctccaacggattcaattggcgcggacgttgcgaacagcgacaactggtgtgttgtacgttttagatgaaccatcggttgggctgcatcctgacaacgtcgaagggctaattcatattttccggcagctagtggcacaaggcaattcgttagtggtagctgatcatgaagtgaatatcatcagtcaagcggattgggtgattgaaattgggccagaagctgggcgcaaaggggaacaagtgattgcccaagggaaacccgcggatttgatccagaatccacagtccctgattggccactatatcgctggtcgagcgaacatcttatatcctaaagtcactgccgcaacgactggtgagcagacaacgatgacggttggccaatattttaatctgcatgatgtcacaatcaaagtgccagataaccaaattacggcggtttctgggttttccggcgccgggaagacgagtttgattctagatagtttagtgccagcaattgaagcgcaccaccaacatgagcaattacccgagcagggcacccagttgacgaccgatttaacgtcagtcgtcagcattgatgccaagccggttggtaagaatatacgctcaacactcgcgacttatacgagtatcatgaacaatctgcggaaattatttgctggtttaccagaatcacaagcgcatcattatgggatcgcgcacttttcgtataacaataaagaaggcgcctgtccgaactgtggtgggttaggcagcattattttggatattcaatatttgccagacatggaagaaacctgtccagaatgtcatggtaaccgctacaaaccagagattgaagccatcaagtggcaaggctatagcatcgttgatctattggctttatcggtggaagaagcaatcccggtctttgcagatgtgccagcaattcaaaaggaacttaagattctcaaagaaattggcttagcttatttacaccttggtgaaagtacaccgagtctttcgggtggcgaagcacagcgcttaaaactcgcaacgcatttgaataaaaaacgggcgggcactttattcgtcttcgatgaaccttctgttgggttgcatccgcgcgatgttgaaaccttagtaggcgtcatcaaccagctaaaatccaagggtgccaccattatgatgattacccacgaccttgatttgatgaccaatgccgattacctgatcgacttggggcctaaaggtggtagtcaagggggccaagtgatggcgatgggtgcaccatttgagcttgttgcctcagacgcggagagtttaaccttaagttatttacgggcacattttaagaagtttcaattaacaacaactaaagtggggtgaaaaaatgggacaaacctctttgtttgatcaagagatggcgatgaatgcgccgcttgctaatcgggtccgaccgtctgatttagacagttttgtcggtcagaagcatttagtcggaccaggcaagtttttacgcgaaatgattgataaagatcaagtgacttcgatgattttctggggaccacccggcgttgggaagaccacgttggcggagattatcgcgcgcaagacggcttcgaaatttatcacgtttagtgccgcgatgaatgggatcaaagagattcggaagattatgaatgaagccgaagaaaaccgccaactgggtgagcggacgattgtctttattgatgaaattcaccggtttaacaaggcgcaacaggatgcttttttaccgtatgttgaaaaaggcagcattatcctaattggtgcgacaaccgaaaatccgtcgtttgaaatcaattcagcgttgctatcacgttcacgcgtttttgtgctaaagcaattgacggaagcggacattattgagttgctacaacgggttttaaaggcgccccaagccttcccggatttaacggttcatatcagtgatgaattattgaagcaagtcgccatcttttcgaatggggatgcacggacggcgctgaatattttagaaatgttagttattaatagtgatgtgcaagaccatcaagtgaccgtcgatggcgatctattgggggaactgctaaataaaaaaaccgcctattatgataaagacggtgaggaacactataatattatttcggctttgcataagtcgatgcgcaatagtgatgtcgactcagcgatttattggttggggcggatgattgacggcggcgaagacccgatttatattgctcggcggctcgttcgttttgcgagtgaggacattggtctggccgataacaatgcattgaatttagcaatgaacgtctttcaagcttgtcaggcgattggcttaccggaatgcgacgtgcatttaacacagtgcgtgatttatctatcgcttgcgccgaaatcaaacgccacttataaggcgcggacagcggtgcaaaaggatattaaaaagacgattgatgaacccgtgccattgcacttgcgtaatgcggcgacgaaattgatgaaggaagtcggttacggcaaaggatatcaactcgcacatttctacgatgatagattgaccacgatgccaactagaccagagagtatcgccgaccatatttattaccggccgaccgaacaaggcaatgaaacgcggatgaaacaacgtttgaattacattaatgaatggaaacaaaagcacaatactgattttcaagataaataaaaagtcgcagtcatttgactacgactttttaaattaagcttcttttgccactggacgccagaggcctaagattagggcactgacaaatgttccgattaacacggcaagcacaaagagtaggccgtggttggcaagtggtgccacgaagatcccaccatgtggtgcagggacagtgatttgccataattgggttaaaccaccaccgattgctgaaccgataacacttgaaacaatcacgtgtaacggatctgatgcagcaaatggaatggcaccttcagtaatgaatgaaatccctaatacatagtttgcgaaggcttgtttccgttcactaccggtaaatttgtttttgaaaatagtagcagcaaccgcgattgccaatggtgggaccatcccaccagccatgacagcggccatcaatgaaccatctttggtggttgtgaagacaccgattgcgaaggtataagcagccttgttgaaaggaccgcccatatcaacggccatcatgccacctaaaatcgcaccaagtagtaatgcgttaccagcccctaagtgtgttaagaaggtactcaaccagaggttaatttgagcaaagactgggttgatcatgaagtacataataaagccaacaatcaatagtcctaatacagggaatattaagattggttttaaaccatcaagggtttgtggcaagttcttgaagactttcttcaaaccaacgatcacccaaccagcgatgaacccagcagctaaaccgccaaggaatccggctggactctttgaagcaaggacactggctgttgcttggctagccatgtagcccccgacaaatccgggcattaaggcaggccgatcaccgattgaaatcgcgatgtaagcagcaaggaccggaattaagaagttaaaggcattattgcctaatgagttcaagaaaataaaagtggttgaatgtgcgccaacggtttgttccaaaaggaatgagatggccatcaagatcccaccaccgacaacgaatggtaacatgtttgaaacaccattcattaaatcttggtagatgcgactccaaagggttttcttgtcagctgaagcttcttcgcttgattggctttcagttgcgtgatagattgagccttcttcatccaatgttttttgaatcaattcagctggtttcttgatgccgtcgatcacgggacggttcaagagatgtttaccatcaaaacgaggcatatcgactttcttgtcggcagcgatgataacccctgttgcgcggttaatatcgtcagcggttaattggtgtttaacgccttcagaaccgtttgtttcaactttaatgtcgatgcccattttagcagctgtttctttcaaggcagcttcggccatgtaagtgtgggcaatcccagttgggcaggctgtgacagcaacgatgaatggtttttgatcatcagctggcgttgcggctgcggcttgtgctttagcggcttcttcagcttcttccttcgcatcttctgcgtctttagcagcttgagccttagcaaagagcgtttgcacgtcttctggtgtttgggcttgtttcaaatcagcgactaattgtgggttgattaaaagggatgaaagaccagccaaggcttgtaaatgcgtatcgttagcgccttctggagcggcaatcatgaagaacaagtaaacgggttggccgtctagtgcgtcatattcaacaccgttttgacttttagcgaatagcacagttgcgcgttgaacggcactgtcttttgcatggggcattgcaatcccttcgccaattccagttgatgattgagcttcacgagccaaaatatctttacgatagagggcgtcatctgtgataacaccgatgtctttatagcgggcaaccatttcatcaacagcggcttctttagtcgttgcttgtaaatccatgatcatcgcatcttttaagagtaaatcttggatgttcataataaatctcctttgtatttaaaattaatcaacttgtgtgatttcaatttgaggtaagagttcgttaatcttagcgctagtggctaaatcttcagaaaaggcggtggcactaccacaagcaagacttgttttaaaagcggcgagtgcatcgtgatgttgtgcgaatgtgccgacaaaaccggcgatcattgaatcaccagccccaacggaattaatcactgtccctttaggtgtactaccgaggtaagcgtggtctggtgtgattaaaagggcgccgtcaccggccattgagaccaagacatgttgggcaccttggtctaataatttgcgaccagcggcgatgatttcactttggttggcaaagtgtgtgtcgaacagttcggccaattcgtgatggttgggtttgatgaccaatggtttttcagccaatgtgtctaacaaagcttgaccggttgtatcaattacaaattcagcgttgtgcgcttgaatcaatgggattaagtctttgtagaaactagccggtaaattaggtggcaaactcccagacatgaagacaatatcgccggcttccagcttagtcagttgttgtttcaagttggcaacggcttctgctgaaatgtgtgggccttgaccgttaatttcagtttcttcagtattgtcttttaacttcacgttaatccgggtgtcttcttcgacttcagtgaatcgacagtcgatcgaagcgttgttgagtttgctttgaatgaattgaccagtgaagccaccgacaaagccgagggcaacgcttggtaatgctaattcggcaaggatgcgtgaaacgttaatccctttaccaccggggagcttaacgtcagattggacgcggttcacgttaccggtatttagtttttcaagttgaatgacgtaatcgattgatggattcgccgtaatcgtataaatcaagataaaacctcctggatttctgtgtgtgaatgatagtgtttgtaaacagatggtgacaattgatcagtaatcaattggacttgtgccaatggggcaaacttactgaacgaaacagcgtcgaattttgtgtgatccgccaaaaccatcgtttggttcgcttgttgaatcgcaaagcgctttagagtggcttcttctggatcaggggtggttagcccagcttcaacatcgataccgtttgtgccaagaatcgcctgattgaattggaattgcaaaagggtttctaaagcagccgcaccgaccatcgctttggttttgctcttaacacgcccacctaatagaaaggtttgaatttggtgatcggctaagagagaagcggtatcaaccccattggtgacgaccgtcaaattcatttcaggtcttaagtaggggatgattgcctgggtcgttgtgccagcatctaagtaaatgacgcagccttgttggatttgtgctgcggcaaacttagcaatcgcgtttttttcatgaacgttcttgccgtttttttcaatctggccaagttcttcttgtaacgtgttgatgcgcttagcaccaccgtgaattcgagtagcaagcccttgttcttcgagcaattgcaagtcacgacggacagttgattcagaagcgttcaataactggcacaaagattgcatcttaacgacgtcttgttgctttaaaagttgtaatatcgcttggtgacgttcttctgttaacatgacaaaacctccgtagcatcattatgacatcgtttccattcaaaagcaatcgaaatatttcaaaaacgttcaaaaaccatcaaaacgctgatatagaccgaaaaaaagattggtgcgttagtgagcaaactgcggacaatgccagaaatagaccagtttaaaagtaatgtaagagttttcaaaagtgcttaaggtatgctagactaatagatgacagggtggtatagcccaattattaggaggttctattcatgggaaaactaggcgtttcaatttatccagaacgatcaacttttgaaaaggatgcggcttacttagatttagcgcatcaatatgggttccaacgcgtctttacatcattattggaggtgtctggcgatcaagaagccgtgttaggcaactttaaacgggttgtagcccatgccaaccaattaggaatgcaagtcatgattgatatcaatccgggtttgttcaagcaactcggtatttcatatgataatttaagttttttccatgaacttggtgcttggggaattcggttggacaacggttttaccggccaagaagaagcggaaatgacgcgcaatccgtttaatttaaaaattgaaattaatatgagtcaagggacaagttacgttgataacattatgagttattcacccaaacgagaaaacttgttaggttgtcataacttctatccacatcggttctcgggattaggtgaagacttcttcaaacaatgtacggcgcaatttgcaaaatacaatttgaatacagcagcgtttgtcaattcacatgaagcgactttcggaccatggccaacacaagatgggttgcccacgatggaagttgatcgcgatttaacgatggcaacgcagatgaaacattacgttttaatggataacattgatgacattattgtcggtaatgcgtatgcttcggaagcagaattgaagacgatgcatgacgtctttaacgctgaattcccagcaatcgcaatcgacgtcgcagatgacattacggctgatgaacgcaaggtcctctttgaaagtctgcatagttatcgtggcgatcgttcagaatatcttctacggtcaacgatgacacgggtcatttttaaagacctgcttttcccagcccaccatacagttgacatccaacacggtgatattttaatcgataacgtcggttacggtcagtataaaggggaaacccaaattgccctcaaagccatgccaaatgacgggcgcgtgaatgtggttggccgtattacgcctacagaattattcctattagactatttgaaaccatggagccaatttaaattggtgccagctagccattaattaacgaataaaaagcgtactgattgaggtcactcactcagtgcgctttttatcgatgatagagccaattcagtgtttaaccagttatctgtttacttttaatctttttttcggtagtatataaggtactgtttaacgatgagaaggagtcaaaatatgtttgtagatcaagtcaaaattgatgtgaaagctggtaaaggcggcgatggtgcagttgcatttcgccgtgaaaagtttgtgccacttggcggaccagccggtggcgatggtggtcggggcggaagtgtcattttagtggtagatgaaggtctacgaacattaatggactttcgttaccgtcatcactttaaagccaatagtggtggtaatggtcagaataaacaaatgtacggccgcggtgccgaggatacatttgttcaagtgccacctggtacaacggtgcgcgatgctgaaaccaatgaattactcggtgatttaaccgaagatggccaacaattagtgattgctaagggcggtcgtggtggtcgtgggaatatgcatttcgcaaatgcccgtaatagtgcgccggaagttgccgaaaacggtgaacctggtgaagaacgcagcattcaacttgaattaaaagtgcttgctgatgttgggttggttggtttcccatctgttgggaaatcaacgttgttgtcagtggtgacaagtgcgaaacctaagattgctagttaccaatttacaacgttggtccctaacttagggatggtgcaactcgatgacggtcgggactttgtcttagccgatttaccggggttaatcgaaggggcttcagacggtgttggtttagggattcaattcttacggcacgttgaacgaacacgggttgtcttgcatttaatcgaaatggacgatcaaacgggtcgcgacccatttgaagattaccaacaaattaatcacgaattagagacctatgatccaaaaatcttagaacgaccacaagtgattgtagcgactaagatggatttaccaggttcttctgaattattagccgagtttaaacaaaaattagcagctgccggcgatacacatgagatttttgaaatttcaagtatcacgcatcaaggggtgcaatcattgatgaacaagacagctgacttattagctgaaacgactgaattcccaatgggagacgtcgaagaagttcaaacgcaaaaactttatcaatatcaaccggaagcacctgctttcatcattgaacaagatgaatacggcacgtttattgtgtctggtgacaaggttgaaaaactcttcaagatgagtaacttggatcatcaagatggtgtcatgcgttttgcccgtcaattacgttcaatggggattgacgaagccttacgcgaaagtggcgcacatgatggtgatttagtggcaattgataactttacgtttgaatttgtcgaataataggcacgtcaagaaaggaagacattcatttttgaatgcttcctttttctatgggatgcataaaataacagggcttaatgtaggcacatcactaaaatattgttataatagcagttattagaatgtagagtaggttgaaaaaatggcgggcaagaagcgtttaaagaatagtcgttacattactggctttgatggtttacgcgcaatcggcgtgattggtgttattttataccatctgatgccatatacttttaccggtggttatttaggggtcccaatcttcatggtggtttcggggtatctaatcaccgatttgttggttcaagagtgggaacaaaatcaatggattaatttaaaaagtttttacttacgccgggtaaaacgattgtaccctgggctgataacgatgctgtttgcaacgggcgcgtacatcacgctttttcagcgggaaatgttacagcaacttaatcagattattatcacgaacattttatacgtttataactggtggcaaattggacatggtcagtcgtatttcgatcggtttgccaataatgagtcgccgtttacccatctgtggacactatcgattgaagggcagttctatctaatttggccttttatcgttgtggccttgattattggtcttaagaataaaaatcggattgcccaagtattactagcagtcagtgttgtttcagcaatctggatggccattttgtaccaacccaatgctgaccctagtcgtttgtattatggaacggatacgcgggtcttttcaattttactaggagcagcgctggcgtttgtttggccatcaacagcccttaagcaaaagattgtgcctaaacaacgcctcgtcctcgatggcatcgggttagtgagtgtcctcagtttggtttggttaatggttaagttgaatgccgagagtagtcttgtctatcgcgggggactatttctgtttagtgctttagtctgtgttttagtggcagttgtcgctcatccaggcgctgattggaatcggttattgacgaatccggtctttaactggttaggtaaacggagttacgggatttatctgtatcaatttccggtgatgattttctttgaaataatcttcaaaaatatcgctgatcacccggttttatatccagtgattgaagtggcgattattttcggattgaccgaattatcctaccggtttattgaacagccactagcacactatccgtacaagcagttatggcaccaattgaagcaatttatgcaccaaccacattggaatcgggtggttggtcgagtgactggactcgcaattgtctttttaatcgggttagtcggggcgtttcaagcgccattccaaccggcgccagatacgcataaatcggcattagcggtcaatattaagcaaaatcaaaaagctaaccaaaagcgtaaggatgcgttgattaaaaaagcaaaagcccagaataaatctggacaagcaaatggtccaacttcaaaagctgaaaaagcggctgaggcggctgcgcaaaagcatccaatcaaccaagaatttgaaaaatatggcttgagtcaagtgacgattcaacgggcccagaatatctcggtgactgcaattggtgattccgtcctactcgacggtagtcaagctttacagaagttattcccgaatatgttggttgatgcggctgttgggcgccaactctatcaaagtattcaaattgtaaaagattatgatcaaaaacaagcccttagcgatactgtactggtcagtctaggaacaaatggcgcctttacgcaagaacagatggcgcaatttatggcagccattgggactaagcgaaaagtctattggctcaacgcgtttgtcccaacgcgtccttggcaaaatgatgttaaccagacgcttaaaaatgcaactaaacagtatccaaacttaacggtgattgattggtattcacaggctgccaaacacagtgactggttctaccaagataaggtgcatccgaacccaactggggtcaatgaatatgccgccattattaccaaagccctcgcggcaaaataaagcgttgaattaaagacagattggaagagctaaatggaattagaatttttaggaacaggcgctggagttccagcacgacaacgaaacgtcacaagtgtcgcattgaaattattggatgaacgaaatgaagtgtggttgtttgacgtcggtgaagcaacgcaacatcaaatcttaaaaacgacattaaaaccgcgcaaagttaaaaagatctttctcacacatttacatggggatcatttattcgggttaccaggctttttatcaagccgatctttccaaggtggcgacgaaccacttacgatttacggccctaagggaactgaagaatacgtgcgcacgagtttaaaaatctctgaaagtcatttaacgtatccattgaactttgtcattcttcctgaagaaggtgttttgattgatgatgcgactttccgggttgaatgtgctaaattggatcatcggattgccagttatgggtttcggattattgaaaaggaccatccgggggaactgcaagttgagaaactgcatgcagatggtgttccggctggtcctgtatacgcaaagattaaaaagggagaagtggttacactcgctgatgggcgccaaattgatggcaaagattacattggacatgctcaaaaaggacggattgtgaccattattggggatacccgccaatgtccaccaattgaacgcttagcggctaatgcagatgtattagtgcatgaagggacctttggtaagcaagaacaaaagattgcgcgtcaatatttccattcaactaacattaatgcagcaaaggtcgcaaaagccgcgcatgtgaagcggttattattgacccatatttctgcccggtacctcgggcaagcagtgcgtgatttacaaaatgatgcccgcgatatttttaaaaacacgaaagtagttagtgacttagatatctatgacattccgtttcatggtcgaaaggagtaaacagatgactaaattagcagcattgagagatttaaaccgtaaaattgtggtgattaccggcggctcgtctggtttaggacgagcaattgcctatgaagccgctagtaaaggggcaattatcgtcgttttggcccgtcgagaagctgaattggcggcggttcgcgaagaagcacaccggctttcaggacagccggcgtatgcatatgtcctcgatgtcagtgatccagcagcgattgaaaccattgtggctcaggtgcaaactgaagtcgggattccagatgtgttagtcaatgctgctggttttggaagttttgaaaatgcattcgacacatccatgaccgttgtggagcagatgttccgggttaatgtgctaggtttaatgtacatgacgcgcgcttttgggcggatgatgattgaacaaggtagcggccacatcattaacattgcttcaatggcgggcaagatggcaacgcctaagtcggccatctattcggcaactaagttcgcggttgttggctattcaaatggtctacgcttagaattaaaaccatttggggttcaagtgactaccgttaatcctgggccgattgatacagctttctttgatattgcggataagaccggtaattatttgaaatcggtcgattgggttgttttagatcctgatcaactagcttatcggattgtgaaaacaatcgggcatgcaaaacgtgaaattaatgcaccatggttgatggcgatcggtgcacaattctatcaactggcaccacatatcggagactatgttgccggtaacttattgaataagaagtagggggggggcagttttatgaaaaaacaaggtcgattaattacagtattggtcctagcattaattgtcgtaatttttgctgttttaaacgttgaaccagtcgccattaactttggattcacccatgttaaatggccattaatcatcgttattttggtgtcattattgattggcgccatcattaccttcttggcagcgactggcagcacgttgagccaacggaaagcacaaaaggaaatgaccaaagaagtcactgaattacgcgacaatcaagctgctcaaattaaagcagcggttgaagcagaaaaaataaagaatcaaagaacatttgataaagcgttagcagataaggaagctgaagtccatgaattacacgcgaaaattaatcaaatcacacaaacaagtgatcatcataatgcatagaaaaagaggttgagtgaagtgaaccccaaatattggacgaaactttaagctatatcgaacagtttgtccgtaattccatcataggagccgctcttgcaacgtctgttgagcgcaagacacgaaagtatgtcgcctataaactgagagatcatacaagtaactctatgtatttggcgtttaaacagttaatgaaggattttaagggagctgttcattctgttacatgcgatagaggtactgagtttatcaatcaacaatatgtgtcagaactagaagcatctggtttatcactatactttgcccatgcttacagtccctatgaacgtggatctaatgaaaatcataacggcttacttcgagaatattttccaaagggaacagacttcagtaaaatatctcactccgaattaaattatgccgtagagagcattaataatcgaccacgtaaagtcttaaactggcagacagctaataccacatttaaacttgtatcaaccttaaacctcgtgtaagcttaaaaaaaaaagcaaatgaactctaagcttatttaagtagcaaaaaaattggtataggtagttatttaactctattttgatcaatacaaaaaaacagatgctttcaacacttcaaaagcaacactttttagaattaaacatcagattgatttaatagaaggtaattattaaaggtataagttatgtatttttatataacttatacctttaataattgacttattttttgatataacttatactttatatataaaatacagatggaggtttcttatggcaactacattaactatcggtaattttaaaggcggtgttggaaagaccaagatggcgacaatgcttgcattcgacaatgcccttatcagaaacaaaaaaaccttagttctagatttagatcctcaaggtaacgcaacaaagatcttagctagaacaggtggtctttcaaaaattcaatatactatcacagaccaaattattgatcgccacagtaaaagatacacagaaacattaaaagcactcgcacaagagtctccagataaaggtattcaacaactagaagcagatccacgcgctattatatatactttaacaccagaggaaagagcagtctcactggaccaatgtatctataatattcgagagaatctcgacatgattggctgcgacactgcatttagaaactttcctgcatttattcgcacgtattcaaacgacgagcaagaacaagtacgttttattgcaaatctaattaatgatttaaaaaaacaatatgatactattttcattgatgttccaccgactatttcagaattttccgataacgctatggccgcatctgattacagcataattgcttttcaaacccaagatgaatcctttgatggtgtgaataaatatattggctatcaaaactttatggttgaacaatttaatattaatcttcaagttattgctattgttgcttgtatggttgaacctgatgataatcttgatcaggaaatttacaatgaggccaaagaagcgtatggagatgtcgttgctgatactatcattacgcaccaaaaacgacttaaaagatactcaagagaaggtattgatttaaaaacatataaaaatggtaactttgatcaatgggacttcaaagctcataacggattcaatgaaattcttggagagattgaaagtagagatcaatatttgaaatcattataaggagtgagctaaatggttgtaagacaatttaacactgacaatacagaagaaaaaaaattcacacgattactaaataagccacaatcaaaagttcaatcagtagaaattgccggcgaatattcatttggtaccggtacaacaatgaatagtagaaaagcaacatctaaaacaacaacaccttcttctccagcgttagaaaaaggatcaaaaaagcaaggtcgccctgttgaaataaaagatgacagataccaggtaacacgtcctaagaaaatatcaccagctttagaaagtaaattatctctattgcaagattatatgacagaatttgctactacaactaaaagaatatcatttgataaacttgttaacactttagctgattcctatatagatacgagacttggtatggctaaaagcgaacacttaaaatcagaaattgctgctgaatttgagaaaataaaaaaataaattatatttatacacaagcaaaaaaggtataagttatacacgttctaaagcagaaagggtataacttataccttttaatttgttgaatatcacttccacagcaacaaattaaccaattccaaaaacttataacttatacatttaatccatttaaagtataagttacatctagtaaaaccgagtataacttatactttaattatagttgtcccttgctatacttcgatataaatgttattttcaaatagtaaataaaaagccatcacgaacggtaattcgtgatgacccactttaagaagttatttgactgtaatttcttctaaactatgtctttgattataggctattttgttcaaaatagcaatataaaaaggcttgtttgagtatacataaaagtaggtcgtgcggcttttcaaaagagattctggtttaaccaggctcgcatttgcctactctaaaaacactagagcggactcgcaaatgcgggttcgctctttttaattgataaggagatctaacatggataatcaactgaactattacaacattaagcgggaatacgcacttaaattcttccaagttcctaaggtctttatgacaaacgacaaatataaaaaattgagtgctgaagcaaaacttgctttcgccattctttctgaccgcctccaactttcaatcaaaaaccattggttcgataaagccggcaatatttattttatttacactggcgaacaactagagcagattcttggttgcggacactcaaaaatcacttcaatcaaaaaggaattaactgaggcccaattattagttatgaaacgtatgggacaaggtaaagcaaatcgtatgtatttacttggaccggaaattactgataacgatatttatggcatcgatcaacttgaaacagctgaaaatccactcgcagaagaagttgtaaacattgatttaccaacatctatgaatgatggacagcctgaaacccttgataaatctagattgctgaaaaacagtaatctagattaccgaaaaacggtaactagtgatactgatattaataatactgaatatcttaaaaccttaaatacagatactaaaaaaacagatactctaacggacagtcctcaaaatatcaagcagctacaagacgctgcgctgtttgaagtgcaattagaaaacgacaatatcttttctaaacaacaacttttagccttaaaactcttatcaaacggagattttgaattgttttgtactgttcaaaaaacaattctacgtgccaaaaaacaagcattaaacagtcatcagatacaaagcagcttgtttgatttacaagacgaagacatcgaccaacctgtttatgatgccttaatgcgaattgtccaacaagtacggttgggtgcaatacaggatttaaatagctatgtatttagcactatgtttgatcagtttgagcaactaggcagtaaacgtgccataacagcatataaaactagtggggcaactatcacctgggagtaacttttaaggcgctatcaggctaattattagtacccagggtaatttttattaaatttcatgttgcaacttaattgtctgctatgtcatgatgtacacgaacaaagcgaacaagggttcgtcaaaaagggttaaataccgtatatacaacgtttgaaaaacataagaagctttattttcatgttaaaaatttaattaactaaattcataattgttagcggttaataaattgtatgatttgttaatttattaaaatttgtcgttaatcggcatttagtttaaatttacaaaaatattggaggtagtagcatgaatacgctatattttcacgccacatttgtcacttagttcgtgaattgcaaaataaattcttaaaatttatattgcaattaaaaaaacttaatggtaggtattaatgtatggcgagcaatacaagcatttaagcaatgacactaaattagcctatatggtactaaaagaccgattagagtattctttgcgcaataactgggttgatagtgaaggacacgtctactttatctttaccaatcaagaactaatggacttgttcaattgttcaaagggaaaagtcatcaaaataaaagcagagttggaatcaatcggattactcgttcagaaacaaatgggctttaacccgaaaactaagaaaaatgaaccgaatcgcttatatctgtccaagctcgatgtgaaagcaaccgatgtctatttacgcggcgaatttggtcaaaaaagctctcaaacccttgctacgagcggaagttcaaaaaatggacttaatctatatagagaacctaaagaaagagacaaaaacagatgcaatatagatactcaaaagttggacttttccacagccaatttctcaccagcagaaattcaaaaacaaaaccaggatctcataaatcatgctaatgacttcttaactgatgaagacagtggcttacccgttttcttagaacccgaagccgtgcaactacttagtttttggtgccgtaccccgcaacaaatgcggcgcttcattggtattatcttaaatgctaagtaccgagttgaaaaggatcatcaagatattggcgtcataatcccgctttacgacgaagaactaaaacctttgatgactaaagccttaagacgctactttaacgccctaagaagcaatgaaaagcatatcaagaacgtggaaaactacttgtacggcaccatgcaaaacctatttggcgtttggtggaataaacaagcggctagagaatatgcggccaaacaccccgaagaacagaacactgacaatgagcgttcttgaaattaaacgtcatatggactcatttaagccgttttaagtgttgcatgcataattatattaaaactgctttaaaatcgtttagaagtaaaaataggtgccttaagtggttgaacaggtgatgactgaactaagtgaaagtgaagggagctttttaaataatcaaaccaagcaaagaagtcgaaaaaatagagcaattgttggctgacccctggacagtcaatatttaaggcatttgggaacaagcggcacataatccagaccctgataagcgcaagttgtttgacgcgttacacacttacctcttagataaacggcaagaaaaaaattatcaacgaaaagcatttcgtgatttaacatggacgagtcaaagaatcagtggttggaatgaaaaggaggcacaaaatatgactaagacacaagcatatatggacaagtatcaatttacagttgcagaaaacaaacggtttgctcgaacaaattttaccaagctagtacacactagtgcccgctttgaaggcgtaaataccactttgccgcaaacacaaaccattatggacggcatgagtgtggcaggcgttcctgttgaagatattttgacaattgttaacttaaagcgtgggtggcaatatatcactgatcaaaattcctccttaacgttaaccatggaaaaacaaattaacaagattgtggccgcggaagacgccttagtaccaggagaattacgacaaggaaaaggaggagttgatttaggcagtgaagacttttttgaaccacccttaattaacgaaaaacaagaacaatcctttttacaaaaaattttggctgatccgcaaacaacgaccactgataaagcattgactgttatgtatcataatatgcgccaacaaatcttttgggacgggaacaaaaggacggcgactttaagtgctaataaaattatgattgacggtggtgcaggcttaatcaatgtgccgttagataagtgggatcaatggaacgaactaattgccaattattatcgaactaatgacatggctaaaattaaacggtggacatatgacaatggcattcaaggattacaaattagagcaaacttagagcttaaatcagttgaagacgaaattggtaaaagaatccaagaacaattaaaagattttgcggatcaaaacccagaaattaagccaaaaaatgatccagaaaataaaaacgatcggcctagttattaggttgatcgtttttgagcttattcggcttatgggcattaacgtaatcggcaaatgtttttaaaagctcttcggtttgttcaaccgaaaggttatcagcttgaaagtatttttctagcaaagctcctttttgaattaatcggcgagaacgagctttgcggtcttgccgactttcataatatttagattgccgtaatttaaaatcttcccgctcaattttttgttttaaacgcgcttgctgctcgactagtttttcatattgattagacatagaatttccccatcgcgtatggttaatgatctacggactttacctttaaaaattcagaaaattgcttagctaaaagcttaatctgatcgttagacaaattagcataatctaaattggcttgactgatgatttgtttacctagccgttgttcaatcttatttttttcgtccttaattttttgattaagggcttttaatttagcttcttgtttttctaagttactttgagacataatgatccctccaatcatatttgaaataatcaccgaaactatatcatataggaaacgttaagtcaaagtataaaagttgaaatagcgaagcggaaggcatacactaaaagtaaattcaggataatcagcagaccgagtgaaacgaggtcaatgcgcacttacacacaacaactaaagttggttgtattattgtgctaaacccttgtatcagaagtcgccgttggcgacaacaaaagcaaacccataaacctaaagaaaggtggtgaccgacatggcaatttttcacatgagttttcaaaatattagtgctggtaaaggacgtagtgccattgctggagcaagttatagaagtggtgaaaagttattcgatcaaaaagaaggtcgaagctatttttatgctcggtcagtcatgccagaaagctttattttgacaccaaagaatgcgccagaatgggcgagtgatagagagaaattatggaatgaagtcgaaagaaaagatcggcgagcaaattcacgctatgcaaaagagtttaacgtggctttaccagttgaattaagtgaagacgaacagaaagaattattgacaaaatatgtacaagaaaattttgttgatgagggtatggttgccgacgtagcaattcatagagatcacccagataatccgcacgctcatgttatgctaactaatcgtccatttaatccagacggaacatggggattgaaaagtaaaagggaaaatatattagatgaaaatgggaacaagacttatacaggaaatagtcgttttccaagatcaagaaaggtgtggctagttgattgggataaaaaagaaaaaattactgaatggcggcacaattgggcggctagtgtcaatcaagttttagagcaaaaaaatattccggatcggatcagtgaaaaatcatttatcgagcagggaatagatgatacaccaactcaacatgaggggatcaatagcaagcggcatgaaagaaaagaatttaaccaacaagttaaggactatcgtaaggccaaagccagttataaaaataaccaagaaaaagtaatcaatagaggtcatttagatagcctaagtaaacacttctcgtttaatgaaaaacgggtagttaaagagttaagccatgaactgaaaacttatatcagtttggagaacttagatgataagcggcgcatgctatttaattggaaaaatagcaccttaattaaacatgcagttggtgaagatgtgactaaacaattattgacaattaaccaacaagaaagctcattaaaaaaggcagatgaactcttaaacaaagtggtcgatcgtaccacgaaaaaactttatccagagcttaattttgaacaggccacgcaagctgaaagacgagaattaattaaggaaaccgaaagcgagcaaacagttttcaaaggcagtgaattaaacgaacgtttaatgaatattcgtgatgatttattgactcagcaattattgacctttaccaagcggccatacgttggttttaagttattaatgcaacaagaaaaagaggccaaaattgatctgaaatatacgctaatgatccactctgatagcttagaaagcctagaacacgtcgataaaggactactagaaaagtattcaccagcagaacagcaaaagattactcgcgcagtcaaagatctacgggcaatcatggccgttaagcaagtcattaaaacgcaataccatgaagtattgaaaagggcctttcccaaaggtgatttagatggattgccattgattaaacaggaacaagcctatacagccgtgatgtactatgatcctgttttaaagccatgtcaggccgaaacgattgaacagtggcaagcaaatccaccacaggtgttcagtccccaagaacatcaacaaggactagcttatttatcgggacagcttagcttagatcagttagagaatcatcacttacaacgggttttaaagcatgacggcactaaacaactctttttgggtgaatgtaaagtcgatccaacgattaaaaacagtcagatcgagaaaatccaaaaacagttaaaagggcaacaagccaaggacgaccagtacagaaaagcaaatatcggacattatcaaccactgaattacaagccagttagtccagactattacttaaagacggcctttagtaacgcaatcatgaccgccctatatgcccgtgatgaagattaccaacggcaaaaacaggcgcaaggtttaaaggagactgagtgggaaatgacgaaaaagcaacggcaacaccaaactcgaaaccggcatgaagatgggggcatgcacttgtaatgtaaatgtaaaagcaaatgtacacaagtgtgttcaaatggtgctataatttagttaattatttaagaaaggagttacctgcatgtggcaagacaacacgaatggattagtttatctcaggccggtatcaagctagggcatgatcgatcatatgtaagcttatggttaagacggcacccaaatagaatgcccgaagaatacttaatggaaaccggcacagttaaattaatttcattggaaggcattgaatggataaggaaacaaacaaaaaaagagggcgtcctcgtcagcagtagagttgctaacggggatcagcacctagaattacgccttctaggtgtcaccctcctaacaatccattttaccgggtgggctaggggaaagctagttgcttaatatttctagcctagaaaagggcaatataaggaggtgatccaatgaaagtagaaagctggcaaggcattaatggcaagctagttcatgatgatcaaaaggcgattgtggttgatgacgaccacgcactaactgatccaaaacagttacaagcgatattagatcaagacggtcagccaatcgatgaagttcggcaagcaatgattaagaagaccgttaaacgccagttgaagactgagccgttaaagcttagtggttggtttaatcgccaccaagacagtcaaaatgctaaaaaggccgaaaaattggtaagtgataaaccgactcatcaatataagcagatcaaaaatgaaatgaccttttttggtgagagtttcctggaaggtttcttaggtttctatggcttagaagctgtttagtatctttgattttgacccaataatttgataaactactgtcaaaaaagttggtgatcatatgcaacattttagtcatcattaccaaagcgatatttctcggcaacaattcgatttgatccgtcaggatctggaagcttcaagaaaacgaactcacccaaaacacattgatccttatgatatcttctgtgccatgctctatgtccttaaaaatggctgtacttggcgtgatttgccggctgattatccaaagtggtccaccgtttactactattggatgagttggtcaaaagcccccacccctgataaaccagctttattaactcaggttttaaaaaaattgtcgctgatcgacgattaaggcaagggcggtcagcccgaacttcgttcgtcattttagatgcccaaagcattaagaacaccgctaccgctgaaaataagggttacgatggtggcaagaaaatttccggcattaagcgccatttagccgtcgacatcaatggattcccgcaagctatccatattacccgggctaacatcactgatcgtgacggggcgattgcactcgtcacccttaatttagagcagtttaaattggttcgaaccatgatggttgatagtggttataccggccaaaattttgccaatgagattagcagtttaacctcagccaaggtaatcgtcgttaaaagaaatgagttacaccaattttcggttatcccccaacggtggctcattgaacgttcatttagttggttgggaaattatcatcgtttatggcgtaactgtgagcgtaagctcaacactagtctcatgatggtttcgttagcttttatcaggttacttctcaaaagatactaaacagtttctaagattttttgatggtatctttagattgggtcatgaagtccgtcctaacttattggttttgtcacttataagtttaaggcttcatggcctttttggtctagttatttaggtgttgcacttacattgtaaatccggcgtcacaaaaaaattgactgacgagtaaataattcgttgactcgtcagtcaatcgcgactatactgtaggcgaaaaggttgatcagataccgacatattaaaacgtgtttcaagtttgaccttaaggaggatgacaaaaatgacaacagctattatcgaacttgaccatcttcaaaaaaactttggcaagtttgccgcattaaaagatgtcagtttcacgttggcacccggtcaggttctgggttttctaggacctaatggggccggcaaatccacgaccattcgagttattttaggcttattaaaaaagagtggcggctcagtgaccgtcttcggcaaagatgcctggcgggatgatgcggcgattcatccacgcatcgcctatattcctggggacgtttatttatggccaaatctttctggcggcgaaattatcgacctattgctacgtttaaatggccgccagcataatcaaaagaccgatgaactaatcaaggcctttgaatttgatccgaagaaaaaagctcgtacctattcaaaaggcaatcgtcaaaaagtagcgttaattgctgcgttgtcgcaagatgccgatttgtatatttttgatgaacccacttctgggcttgatccattaaatgaacagactttccagcaagaagttttaaaactgaaaagagccggtaaaagtgtgctgctatcaagccacattttgtccgaagtcgagcgaatgtgtgattcaattgttatcatccgtgatggtagtgtgattgagagcggcaatcttgatcaattacggcatctatcgcggatcaaaattgaagtcaccaccgctaccccaatgactgctttggcaaagcaagctggcgttcacgacctcacttatcgcgattccgagcacaccaaggcggttttcaccgctgatcgagacgcgcttggcaccatcatgaccacactggccgccaacaccgtggtcgacatgcaatcaacgccgccaacgctggaagatttattcctgcgttattatggaaagcaaggtgagactcatgcggcacagtaatcggaacgcaggttatctgcttcgggcaaacctcaaacaaaatctaaaattttcactcatctggcttgtcattttgatcatgatgattgccagtggtgctggcaaattggaagcagcctttgcaggcggggcctcgggctctaaagagattgtcaaaatgctgcaagcgccgggcatggcggcaatgtttggcgcgatgccaaaggtggacacgtataacacagcgattgtgtttgctggtgtgatggtcgtcttcatgattattttgcaggccttatgggttatgccgctgatgattcgcaacacccgcggtcaagaagaaagtggcttgctcgaaatggttcgcgctcgcaatgttgggcgaacggctgccatcaccgccgcttcgcttgagcttctcatcgacagtgccataatgggtatcctctattttgtctcgttggccgctgtcaacatgggtggtactgacttgtacggtgacttcctgttttcactggggatggtgatcgccaacttgctattcggagccattgcgttgctattcgcgcaactaaccaataacacacgtacagccaatatgttgagctacatggtgctgactgccgcttatttggttcggctggtcaccgatatccagcatcaaaatctgacgtggttatcaccaattggttggttcgaaaaagcaaacttctatactgataacaacgtctgggctttaggtttggccttactggtcagcattctgcttgcggccagcgccaccatgattgcccgcaaccgcgatctgggcgccgggattattgctgaacgcaccggccgagccaaagctgccggctggcttcgctcgatccctgccttactgtggcgaactgagcgcggattatttgctgggtggttaatcggcgccgtggtgtttggcggcgtcatgggtagtgtgctcggcggcgttggcgacattcttaaaacgaatccgctttatcgtaaaatactagatgttggccaaatcaacgctgccaatcagaccatggtcctgtcattcttaggcatgtatctcggcattttcgtcgcattagccgtgactgctggcgtccaagtggcattccgactcaaacgcgatgacaaccttggttacttgagcgtcattcatgccgaaaagccaacgcgaaccacgatcagtgtcagctactattgctttggtctgctggcaggcgtgttcgtcctttctgctgggctgctggccttgttcttcactgggaacactgttctcagtcacccgttgccgctcaagtacctcggtcgcctattcgtggctagcgttccggctgtgatatcgtttatcgcccttggcatcgcactagtcggtctgtggccacgcttaagcagtctattctggctgtatatgggagccggtctgatcgttcaaattttccggggattgtttgatttgccaaaacacgcaggcaacttcacaccttttggctggattgccaatgtaccggttgaaaacgttgatcaaacatggctaatcgtgatggttgttagcgctatagtattatttattcttggcattgctggttatcgccgtcaggatttgagcctatgaaaaatgttgtgacagatcctgaaaaggtcacccgaatcctcaaaacagcgacggaaattttcggccagcaaggcttcatcaagagcaaaaccgatcagattgccaaccaagcacaagtatctaagggcttgctcttccattattttggcaataaacaagcgctgtatcttgacgctttcaaatatgcctatcatcgaatttatgatcacatggaccccaaaaagtggcagaatgcccctggcttggctgccatgatgaccactgcagttaagtatgagttgaaactacaattcaaattcccagctgaataccgcttgatgatgcaagcctatgctgatttaccgcattttcccgaaccgttgcgacaacaagtgcagcaagaaacaactgccatatccgctgaaaccgatcgcatttttcgcgagaaaattgaacagctgcctcgtcgtgagggcctgtcagtcgatgacgttttcggtgtcgtttctgccttaatcgcccaacaaacggcggtcaccaccagactcattgccagtggccattatcgcaagtttgaagatctgcagtccgtggttgagacgatggcacgccagttattgattgtcgaacacggctttttaccagatgaaagttgacgtcagctgatagatcaaaaaaggtcattagggtataccctattggccgtttttatttttgtgctatactaggaaatacagatgttcattagaactgtccaaaaaggagcggcaaaatggcaactattggttatgcgcgcgttagttccaaagaacagcatttagatcgtcaattaaatgctttaaagaatgttgataagcttttcactgataaattaagtggtgcaactaccaatcgacccgagttgcaaaagatgttggcctatatccgtgaaggggatattgttttggtcactgaattagatcgattaggcagaaataatcaagacctaaccaaaatcatgaatagcattcaggataagggagctacattagatgtgttaaatttaccatcgatgaccggcatctctgatccgaacttgcgccaactgatgactaacctcattattgaattgtataagtaccaagccgaaagcgaacgtaaacgaattattgaacgtcaacaacaaggcattgccctcgctaaacagcagggcaaataccatggccgtaaagcacaatataaccaagatgatccccgcttacaacatgcctttaaactatatcaagccggtatgagtgatgtggacgtggcccgcaataccggtataaagcggacaacttttattcgttatcgaaagaaatttaagattgtgagaggtggagtacatgaagccacataaaattatcctcacttgttttgcgcttcttgttttgggagtgtgtagcctagtaataaacacctcggctaacgcagcaatctgccataacggcggccgggcggactaccgaggattgattaaatacactaaggcggccaaacgggctaagtcccacgttgagtgtgatacgattttgatagatcaagacagtgccagcgatactttcccggttaacgacatcgaaacgagcgacggtacgattgaacacgaggctcacgtttcgaaaatctctgaagcccaactgtactacttgaaaagtcggggattagacgaagcgaccgcctcccaattgattattatgggatttttggagcccttcactaagcaattgcccatggaatacgccgtggaattagaccggttgattaagtttcagatggagggcagcatcggctaaagctgtgaaatttgcgaacgttatgcaaaattttgcccaataaaaagaacggcgaattaacgccgttcttaaacgattgataataaaattaaattagaaaacatttttaaatcattgcaacaatccttaaaaattttgcaatctaatagtctcgacctactggattatttaaaagctcgtagtttagagaaccccttgtttgaggtcgggtccgtcgaagcctgtacaaaagaattcaattttgatcagctagcggctcacggaacaggtaatttatacgattatttgttggaacaagtcggttatcggtttaaagcaggtaaattacagcaacttttgcaacggctgattttggaggttgaaccaaatggctatttaaaggtggatgaagcccgttttatccaagaaaatcaaattgatcagaccacttatcaagacgttgtgacgttactacaacaacttgatccaatcggggttggtggtcgtgatgcacaagaagtgttattactacaggcctctgctatttatccggctgatgatcttagtattttggtgataactgattattttgaacaattattagctggtgatattaaacaaattcaaactcagttagccattagtcaagatgacatgcaatcgattttacacaaaataggtgcactgagtcttgaaccaggaaatatgtttgatgactcaccaactaattttcaagtgccagatgtcattattaagatgaatggctcacgatatcagctactattgactgaatttgggcgaccaacgctgatttttgaacatgcaagttacgcgcagttccaaaaagaagtcgatgtcgctaccaaacaatacattcagcaaaaatatgccaagtatcagatgttaaacacgagtttgcataagcgcgggcaaacattattaatggttgctgaagtcctaatcaaggcacagtgggattatattactggaaaacaagcatatcctaatcaattgattctacgggatatcgcaaatcaattgcagctcagtgaatcaacaattagccgaacgattaaagaaaaatcaattcggacgcctaatggtatctatcttctgcggaatttgttgaccaaacggagtacaactttagaggaaggtcccaccttgacacagacgcacattgcaattcaaacagttgttaaggaagaagaagcccatcatccattgtctgatcaaaaaatcgcggaccagttaaaagttaagtatgacattaaagttgctagaagaaccgtcgctaaatatcgtcaagaattaggtattgctaataaggcagaccgtaaataagcaaaaaagcaatggatgcagttaatattactgtatccattgctttttaggttcttataaaattgccatcagtttaaaccagtccaatacaagtgggacccactgagctgctacagtattagcatattctggtttgcctggtgtttgagtcacatgattagcaagcgaaaggccatgaacaccagctccaaagagatggtattcaacagggattttatgttgctgtaatgcaagtgtatatagaagtgaattcgttgctggaacaagggcgtctgtggctgtttgccaaataaaagctggtttagctgctgctgtgatatttttttgtgcgtgccataaagtttggtccactgtaatctgttgcttagttgcatcatcaattggaaaaccagcgtcaaaatcaatcacaggataatttaagacaatcgctgcatgatgaccacggtaatcgtctaacccgtaatcagctcggtggattggatcggtcgcaatgccattataggtagcgaccacatgtccaccagctgaaaaaccagtcaaaacaattcgatccaaatcaatatcatattctccagcttgatcagtcacccactcaattgtcttagcaagctgatgtaaagcgagcggataaacggtttcagtcgaacttattaattggtaggggagaacaatcacgtgaaacccttctgctaaaaatcgcaacgcgaccggtgttgtttcacgacctgaatgatacgtaaaaccaccgcctggacaaataatcatgacgggatgtttaactggatgctcgaaatctggaatgggtgttaaccaatatgcatcaactataaatgcttgttctttaacggataacgtttgacgttcgatcgacattattaaggacctctttctattatattaaccgttttcaatctatgttaatcttaccggataatgacaaaaaataacagtattaagcatgactttttgatactaaccatttaaaaatctcattaagtaaagtatgatagttttagaggaaaatgtaatgatatcaggttatacagctctttacggcttggttgcgcatccagcgcaccatagcttgtcacccatgattcataatctgggttttaaacaacatcaaatcgacgcgcggtatctggttttcgatagccaagcacggccgcaagatgtcgcaaaagcgattcggacgcttggtgtggcaggcgttaatctttcaatgccctataaacagtcgcttgtgccattaatggacgagttaatgccaactgcgcaactcgttggcgccatcaatacggttgctttacgatcgggtaaattggtaggcacgaatactgatggcgatggtttttggcgcgctttgcagaaaagatatcccaatctagctagtcagcagattgttattctgggtggtgggggcgctgctctcgcggttatcgaagccgccgctcgctatggtgtggcgacgattcaggtcttcaaacgtcaaaatacgacttatgcggtggttgaacaacgactggcaaaaattgctaatcaccattcgatgtccatcgtgctacataattatgccgatgaacaggcactccaacaagcactcagtaatgctgattgcgtgattaacgccacgaatcttggcatggtcaatacccctggattaccgctggcagcacctttaattggtcaaataccgatgacttgtttagttgccgacttaatatatgcgccacgtcagactgcttttttacagttagcggctcgaagtggtcatccaacccaaaacgggcttggcatgttagttgaacaggccgcgttgagttttcaattctggacgggccaggtcctacaaaccgatcccatctatcatgctttaacgaaggagttttaataatttatgattattcaatttaaaccaaatactgattcagcgctgattgatgatttttgcgcacgacaacgcacgacaaatccgaatgtctatcagattaagcaccatgtagcggtgatcggtgcaaaagcaattgattttacccaagcagaggaagaagtcattgcggcaaccaccacggatgaaccgagttacgtgcttggcagtcggctattccaacccgaaaacacggtcatcgaattagcacacagtacgattggcggtgcagacttcacggtgatggcgggtccttgttcggtcgaatctgctgaccacattatggcgatggccaaagttgctaaagaaggcggtgcgactattttgcggggtggcgcgtataaaccgcggacatcaccgtattcctttcaagggatgggcgaagctggtttgaaagcattgcgcaaggctgctgatgcttatcaaatggacgttgtgaccgaagtgatggatgaaacgcatgttgatttagtggcgcaatataccgatatttttcaaatcggggcgcgcaatatgcaaaacttttcattattgaaagctgttggaaaaaccaacgttcccgttgctttaaaacgtggcttagcagcaactgttgatgatttattaaatgctgccgagtacattgctgccaacggtaatcaacaaattatgctgttagagcgcgggattcggacgtttgacaatcactatacgcgcaacacatttgatttaaatgctgtcccagttttacaaaaattaacgcactatccagtcttaattgatccgagtcatgcgactggtgaatgggatcttgtgacgccaatggctcgggctggagtcgcaactggggcaagtgggttacaagttgagattcatgatcatccagaaaaagccttttctgatggcgcacaagccttaaagccagctacttatcttgaaatgtgtcatcaagtgtgggccgttgatgcagtcgtcaaacagtggcggcactaatggtgataattgatgtccacctcacacaaaaaaattatcagattcggatccaatctggtttgtatcacatctgtgctgaacaaatcgcgcaagtttggacacctcgtcaaatcgcattaatcacagacacgaatgttgccccgttgtatttagaaacggtcgaatctcaattaatccaagttggctatcaagtcacaccgattattattccggctggtgaaacgtcgaaatcacttgaccaagcaatggcactttattcccaactggcagcggcgaattttacccgtcatgacggggtgattgctttaggtggtggggttgtcggtgatttggcggggtttatcgcgtccacctatatgcgggggattgcatttattcagatgccaacctcgcttttggcacaagttgacagtagtgtcggtggaaagactgcacttgatttaccagctggcaagaacttagttggttctttttaccagccggatttagtattgattgatcccgactttttaacgtcgctggatcaacgccaattactggccggttatgcggaaatcgttaaagtggctgcactcaacggtgggacattttggcaacaggtaacagggattcaaagtgcgcatatgattctagcgcaggctgaaacactaattcagcaaagtgtgcactacaaggcacagattgtcatggccgatgaaaaagaaagtaatcaacgccaattattaaattacggtcatacgattggccacgcggttgaaaccctggccaatggcagcctgatgcacggtgaagcggtcagcatcgggttagttgccatgcagcacttagtcgaacaaagtggactgactgaagcgcatttaacaccagtgattacaactgttttaaatgcggtcggcttgccgacagatagcccgttacttatgagtgatcgactcttcacgcaacttttacatgataagaagaatcaaggagatgccattaatcttgtttacctcgatgcaattggtgttccaaaaattcaatccataccactaacgactttagcggctaatctattttcaaaaaaaaactggtaaccaacccacagataccttacaatgaaactaacttgtaaagagtgtttaactgaccgtatgtgcggagcagtcttggaaccaacaatatatttgaaatagaaccataggggttgattgactagatgcaactgattttaatcggttttatggggtctggtaaaacgaccattgcacgcaaagttgcacatcattaccattgtgactggattgatttggatcgctacatcatgcaagaacagcaaatgacgattaacgaaatctttgccgaaaaagggcaggctgcatttcgacaaatggaatttgaggccttacagacattgatccaacacgatgggattatcgcaaccggcggcggggtcgtggatgatgctcagacgcgccatttacttgaacagagtcatatccccatttttttcctaaatgggagttatgaagcacattggcgccgcgtttcgcgcaatgatcggcggccacttgtgaatcaattgggccacgatggtttacgcgaactgtatcacaaacgacgaccaaagtattatcggcttgcggactacaccatttttttccaacataagacaccgaacatgatgttggcagaaatcgatacgcagctacccaggattcaaaaaaagttggctaataaacattagtcagcttttttcaatggtcgtagaatcatattattcgctttttaacgccatagacttgtatgatgaggttataacaaggagggtgaacaatgacatttaaattaccagcactaccttatgaatatgtggccttagagccgtatatcgattctgaaacaatgcatctgcatcatgacaaacatcataagacttatgtaacaaaactcaacgcggcgctagccaagcaccccgatttagcaggtaaatcattacatgatttgttaacacacatcgatgatttacctgagaatcttcaagcacctgtccgcaataatgctgggggccatgccaatcatagtttcttctggcgaattctaacaccgaatgcgccagaagcaccaacgggggaattactcgaacggattgaagcccgctttgggaagtttaagacgttccaagaagcattcaccgaagctgcccttggtgtatttggctctggctgggcatggcttgttatcgatcaaaatggtgaactacaaatcatgacaacgcctaatcaagattcaccacttatgagtcgtaatcgaccactacttggacttgacgtttgggaacatgcgtactacctgaaataccagaataaccggattgattacatcgaaaacttttggaagatgatcaattggccattggtagcggaattactttaataagggtgttcattataatacatttataactgaataaaataagacccatcacttaataagtggtgggtcttattttattttacacaattgtaaacactgtcatcacaattatagagcgatttattcttaaatgtaatagttgtagttatcattattgacatttttaatattaatagaataattatagaaatcattagggttttttaatagacaattttcagcagtccatgctaatctgaatatgttataaaaataataatacttttaggggatgagactatcaagaatgtaatcggaattttagcgttaggaatcctaacaactagcaccatcagttctatacaaacagttaaggctgaaccaagtgacaatcaccaaaatttagcgagtagcgtgctagcagatagcctcaaatccaaggtgaggcaccagcaaaatctaaaagcaccacaagaaatgaaaacctatattggtcgtggtgatgtttttaaagaaaaagaccggcaacgcagaacattacgctactcaagtttagagcctagcggtttatacgcccaaaaaggggatgttttgacagttgctcaggggatgcaagattcattatctatcacaattggttcgcccgaacgagaaaatcaaaaacaatatccattaacaaagggcattacaacgattaccgttgaaaacgagggcccgatttatgtgactaatcctaatgattctggtgaagcaacaatcacaatatcaggggcaacaggatcaatgccatatttcgatttaaatcaaactagcgtcgcagactttgagaaacaaatggcggaaatgacgaatgctaaagatgtgcagttggtcagtaacaaagcattaattacagttagttacgcaatggctaaaaaatatctcggtgaccctaaagaactgatgacctattatgatcggtttttaacggcacaagatcgggtttcaggcattactactgaaggaaatccagtaaactttgttgatcgccatctccaacatttcttagagtcacctaagttgtatatgtatacagaaaatgaatttatgggcttccataatgatcgcgctttgcaacgactactgaagacaaatgaaggttggagcatctggcatgaaagtggtcatcagagacaacaaacaccttggaaatggggtgctgttgtagaatcaagtgttaacatttatgcattagcggctcaaaaagaattgactggtaaaatgacatcgttagatcaatactacccagaaatgcatacttatctaaaatctgataataagcaattcaacgcacaaaataataatttaaagatggttatgtttggtcaattaggaaatacatttggtgataacttttaccccgttttacatcagtactatcgtgaaaacaagcttgcatttggaccagacaatgaacggatgcaaaactttgttctaaatgtttctagaattacgggttataatatgcagccttatttcgaacaatggggatttgatatttccgcagcagttaaagctgaaattagtcaattagcacctttaccagaagctatttggttaaatgataaagaaactaataaacagttacccatgcgcttaatcgacaccgtatcgctgaatgaccacggtattcaagttaacctgactgactaccaaaccgatgtatttaaggatgagcaattaatccttaaaaagaatggacaagtgatttccaaactcgtcaataaagagccaattgaaagtatgttaacaaataatgtttgggaaacaatcgagatgcttaaaccgactgatgtgattacaattgaacagcaaaataaaaatggtacttttaaacgatatgaacactcaattgatagtattgcacttgaagaagagttattaaactatttgaatgcatcagaaccgattggtacaattctaacccaagctaaactagatgctctccgaaatcgaattgatgctcttccttctacttttgactataaagaaaaactcttagaactatttacaaaattagaagacaaatacctagctacattagtcaaagatattcaactggattcacaatcagcattagtggtatcgtttactgatgagaagtttaaagactatgcgaaaattaaggtacttgttgacgaccaaccagttgcagaggtcaaaaatggtatcagtagtggtggtcagctcgacgataatgtcttaacaattcctaaccaagcggatgcacatgttgttaccgtagtggctgaattaccgcacaagtcttacattctcaaaatgattagtcaggatattcttcttctgaaacgtcaagttgaagcgttatttgaaacaaacgatcagttgaaatctgaggtcacacaagacctattagatcaattacgaacacaaattaacgcagttaagggctcggaaaagacgatattgactcaaagaattaaccatgcacagcaactgttcttgaacactttagttgctgacatgagtgttaaaaataataaaatcgtcgttacctttgctaacgaattatttaagcattataagatagtcgtattaggaaacaacagctatctggcagaagtcaccaatggccaaaactactatggttccctaaatggaaatgtatttactccttctaaatcagttgtccatggacatccttatcgggtagaagttagatacgcaagtggaacttacaagattagagagatgattgctgagtaaataaaatggtcccacatcaaaatacgatgtgggaccatttttatctataaattactatccgttgtaaagttgagtggtgataggttcgcgctatccgtaatcagttttgcggtgaggcgttccatttcgtgttgtgcgagttgtgcagccttagcagaacctttggtcatcaacagggttcgttggtgtgcatcagtttcagcagcaaccgcttgatcagttgccacgatgttttgaaccatcaaactattgatgtgtttttgcgtttgttccaagtccttggcgaacttggcgtagtgtgcatccaccaaaataccagctaatttataggtccagtagatcgaatcttgactgtaatcctttgtccctttttggtaattgactgggacgtcatcggcaccggcatagaatgggacgtaaacactttgcgccgtgacacccattgataaccaatgaataccgctaacatcaaccggtaagttagggcgcatttggagaatgtgtgattcttgcgtctttgctaaactaattgggcggaaagcatgtttttcttgtggtgtgccgtgaccgattggatcgtagaccgtgccttcataatgcgagcctagaattcgcgcgacatcttcgacttgaatgggcgcatcggcttgtcgtaagaaggggaggttaaagtcttgaggttgttgggtgacagatggcgttaacaatttttgaccgtaccaaacgcgcggtgtgttgtaaacaaggtcactttggtctttggtcccaaagatatcgcggaagttaaatggcgtatcagcttgccataggtgattatcacgcgcaaaatcttgaatcccctctgaagtcatgaaccaatccggttgatcgaattgcacttcttgaatcgcaagttgattggcaaccacggcatagctatcatccggaatccgttgggcaacccagtgatgtccactgccgatttcaagataccagacctcatcgacatcggaaaagagaatcccgttactttcagtggtgccgtattcactaacgatggcgcctagccgcgcaacaccttcacgggccgttttcacgtaaggtaagacgactgtaatcatggcttcttcagcaatcccgttgtcgatgtaggggtcaaagccgagagcgcgactgttgctataagcactttcggtgccgctcatcgcaacgccgtattcgttaatgccgtcttcttcgaatagtccatattcatcggtccattcgggtgtcgccgtgtattttgcggcttcaagtggtaaatcgattgaaaaacccgtgtcttttgagacaaagtgcggggcagtcgttaacttttgatggggatggatggttaaatgtttaggccaagctgcctggctatcttcgttacgtgcgattaaagttgagccgtctgcagtggctttcttaccaactaaaacactggtacaggccgtcaattgacggtaaaggggttcactcattgtaatgcctccatagataaatcaatattagctattattatacattcttttgcttaaaaacacagtaattaccgttgctcaattgcgttaaaacaggcataatataagtattcaattaaaggaggcaccacacatgccattagtacacatcgatttaatcgctggccggagccaagcacaattaaaacaactctgtgcagacgtcacagaagcaatcactaaaaacacaggcgcacctgcagaacacgtgcacgttgtcctaaacgaaatgcaaccagaccgctactcagtaggcggcgtgctaaagagcgacgaaaaatagagtgcgacgtcagatggtcatacgctgaggattagtctaataccgtgaatgagcggcgtagccgatcgtttgcggtatgtaactaaccggaagtgtatatctgacggagcacgtttcagaatagagtgtgcaataagccgggtatcttctgaggattagcctaatcaggcagattaccgacaaaatcggtgatttgacggatgtagctaagcacagaaagttagcttgaaaagcacgtttcatccatcaaaaaaagcgattcgaccagaaattgtcgaatcgctttttcattaatccatcttaaaatattgccgtaaataattgaccacaccatcttgcgcattcgtcagtggtgtgatgtcgtctgcaatcgccttgatcggtgcaattgcgttttgcatcgcaaccccggtaccggcataggctaacatatccaaatcattactttcatcaccaaaggcaatgatatctgattgatcaatgtcgtagtgtgccgctagttttgcgaggccggttgctttgtgaatcccatgatgcacaatttctaagacgctagcaggaccaccccaagtgttgacggaaacgtcagggaattggcgcagaatttcagcacgtaacgcatcttgatcagcgcgttccacaaaaaccgtgacggccgctgggtcttgccgaagcgattcgcgggttaaaatttcatcggacttcaacgttgtggggaagaaagaaaacgtgttggcataagcttgatcagctaaaaacatcgttttaccttcggcggcaatcatttgaatcttaaagcgttcttttagttggaagagactaaagacaatgtctttattaatcgtatattgatattcaccggcccaggcttgtcccggaatgtgcattaaagccccattaaagttaaccattggcgacgttaaacctaattgttggtagaaaggttcactcaaacgatttgggcgccctgtgacaatactgacaatgtggccagcgttttgtaattcagttaaagtttgttgcgttttaagtgtaatttgggcatctgaattgagggtagtcccatctaaatccagtgcaatcaatttttgatgcatagcggcgcctccttttaaaaacgtgtttggttaaaacacgatatgtctttttattctagggggtatgcggattgttgtcaatgatcgtcagttgtaactggtcggttgaaccagtataatagagctattagagtgaccaggaggcaggacacatggcagaccaaccacaagatgatgcagcaattgaagacttaaaggaacggattctagccgcgctcgagaccgtgattgatccagaactcgggattgacattgtgaatctcggcttggtttacggtttaaacctggatgaaaatggcttatgtacgattgatatgacccttacaacgatgggctgtcccttaaccgatgttttaacggattcgattcatcaagcaatgggcaaaattccagaagtcaatgaagttaaagtcaatctcgtctggtacccagcgtgggataccagcaagatgtcccgttatgcacgcattgcactcgggattcgttaaaacgttcgatttggccttccgattgggaaggtttttctaatcgtttaagagaaacttatattagaaacggaatccattatgatacagttaagttatccagagaaattgcgccagagtcaacgtttttttgcaaccgtcccagccattcaagtacaaattcatgctgttttaactagtttattgcagattgaacaggacggcttgcccatacataatttacccgttttgggaattgatgaatctctgtatttagaaatattactccaggctgaacagggggcttttagcgccgctagtgtggctgaggttcaacgtcagttacagttaatcgaccacttactgcgcaattaccgtgaatatttgcaaaatcgctttggcatgtgggcctatatcactacagatttgacggcggcgattgtccgcgagtttcccaattggcgttttctagaagtcatggctggtaacggctatttaagtgctggtttacggcaggcaggcgctgatgtgatttgtaccgatagtttagcctggactgccgagaatgaaacagggcgccaattagtcacgtcagtggcagctcttgacgccaaacaagcggtcccaaaatatggtccgcaagtcgatgcagtcttaatgtcctggtcacccaacggcgtcccagttgattatgaattgctgcaacaacttcgtgcaatgccaaatgcccccgttttgttgtgcttaggcgaacgttttggcgccacgaatagtcacgccttttggacggcggcccattatcacaacgacgcccgtttatcacggattaaccgttacttacgcccattcgatttaatgcgtgatcggttttactggattcaatagtctgctttaaaggagggcccactgtgcgcctgaaaaaaataatattagattgtttactagttggtttaacagttctaggcatgttaacgattagccaacgtgcaaaaactaactatagccaacgcttaaatcacaatagtttatcagaaaatgctgtgatttttaattctaagagtcaacagtcgattcaaaaaaccattcaaaaaattgatgccgcgaaattaagccattttcaaattcaattcaacgttgattcccggttctcatatgtctatgcgaaagggaagttatcgagtgtcccattaaaagacggccggttcttctccagttacgatttcaaatcacagattccagtcgtcgttgctggtcaatcacgacttgctgaactctacaaaccagctagtcaagcgtattatcaagatcatggtcgctacttatccgtgattggcgttgtcggtacgaatcagacaactacgcttgatcagcacatttttgtatccacgtcaccagaatttgtattaaatgatcgcccactgaataaagtcaccgtattggttgatggtccgcagatgggagcgcatctgaaaacttaccaaaagattttcaaaacgactaagcacagttatttaacaccgaagacgacgccgttagtcggcgtcaactggctccgtcaaaatgcgggtgtaatcgcggtaattgccgtcctcatgatcatcgcggtcggtttcacttatttatttagccaagttatcaatggttatcacgcacaaaaagggctcagcactggtttatatcgtaaattccgcgtggcacaaacccaaatttttgcgctgcacctagttgttagctcaatcattggcttctcaattggtagttggttcttttacctaacgggtcgaacagcgatttttattggattgatgatcattgatctcatcttaatcggtatcttttattatttaattccaaaaggacgaaaaacaacatattaaaaaaacggtttagtcattagattgactaaaccgtttttttttaagggttaaactttacgccgtggttcaataaaaacagcgcatgcgccactgataaatacaagactgaatagagttgtaaaccaatctcgaactgctgttaagcggtctggcacaaaagtcataaataaaatcatcgataataaacacgctgcaaacatcgttttaaaaacgcgatacataataagctgtgagcgttcatccgaacgtccaattctagttataccatagtagaaaaacagaattgaaatgatgattaatccgattgccacaccagcgattacatgggcattttgatttaaaaagtgtagtaggggccatattgttacgcctcccgataagtgaatagaacgtcaattggtacatcaaaaaatcgtgcgagcttaaaggctaaaatcaaactaggtgagtagttgcctttttccattgcatagatggtttgcttggaaacaccaaccgcttgacctaatttttcttgagaaagatgttggagtactcggtattcatagactttattttcgacataattcgtttctttcaatatgcaccacttcattatcaaagtttacttatacttttaacaactatatttttacattatccaagttaatttgtcaagtgctttagcgaaaattaagtaatttaaattgaaagtcaaatttgttcgtacttttatgtccggattcttgacataggagcctagcttgcattagctttggcaccgatatttgttgtttcgtgtaggacaatgtatttattgtttgttgcttgagatgagccttcattagctcctaattcgtaagaattatcgatattaaaattcatttatttatctcctttacgttatcgttttcttgttttggttcttaatcttccatgtcttggccaaatttatttagcctgtctttaataaacttcggtagcggcaatcccatttgtccgatattttctacaatcgaagttgcatacatgaatgtccacaaacttaaaactgagtcacctagccattggtagttaatcgctagtgaccatggataaagcaatgcgaccaacagaataatcgtgaagtgtcttgctaatccttttttgccgatcgaactatccacactatgagtgatgattgattttgctattcctgtaatcacatcagcaataattaaaataaatagtgtatttagtaaagtgttgcttcccatatgttcgatagcaaactgccaatcggtaaagcctgcgtgtggtagtaaaactggtgttccatacatatatatttcatctcctaaatttttgtactaaaaaaaaggaactagctttttagctgattcctgtaatctttagttttactgtcttacctgtatcgtctgttgctgtgatggtttgacccatcagttatagctgtggatgttacttcttattgttttcattgactaagattgtcaatttttgttttcaacgaagcaattgaatcagaaattaacttaatctgatccagtgtccacgtttgggttgcatatccgttgagatccttctgctcaattttcttagagatatcaagtcgcataccatccacggcttgagaaagattggagaccaccacatttaaacctaattgcagtttcatatttgaaaatgtaatagtggatgtcgaaggaatattatcaaggcggatataaacaccttgctgcgaaaacccatccagcaagatggttgccacataatgtctctttgtggtatcagtggtaccaacaatgtagttcatccaagttccaccgtctgtaccagaatcatccccatgtatatggggagcactgggttagtacaatttttctatcactcatactagaatcatccccatgtatatggggagcactaattgttgaagctgtgcgaagtcgcctgttaagaatcatccccatgtatatggggagcacacgaacaagcacttttagattcagccaaagcgggaatcatccccatgtatatggggagcactgagcaacagcgataataccatcccatccgttagaatcatccccatgtatatggggagcacttgctgcaattgctgcagtcgtcgctggacttggaatcatccccatgtatatggggagcactcagcattgattagtccggcattttcagcattagaatcatccccatgtatatggggagcactttcttatattcccgaaataatatatttttgtagaatcatccccatgtatatggggagcacatttctttcataacagccgtcttagttttattagaatcatccccatgtatatggggagcacgctaggaggaagaaaatgttcgtattgctattagaatcatccccatgtatatggggagcacatattattaaggccgttcgggacgctatttcaggaatcatccccatgtatatggggagcaccaagtgaattttgaattgatgatagcgcctcgggaatcatccccatgtatatggggagcacggagacagtttctcaagaatcgtgcgggatccagaatcatccccatgtatatggggagcacggtgtgcaaggtgggcgtgccatgaacgtgctggaatcatccccatgtatatggggagcacactaaaaaaagcctttacataggcattttcaaattacaaggttgccgttttttattaacttctctgctaaagacaacgtagcttgagcatcagataatgcatgatgtggatctaaattctctatctgatatacttccaagacagtcgttaaacgatagttatctaaaaactcctgagttgtttttactattggcataagatcgtgggtagagttagtaaattcggtttttccaactttccgcaatgcttccgttaaaaacctttcatcaaattcaagattataaccgatgatgactgaatccttaacaaaatcagacaatgcctctaatcctaatgaaagctcaacaccctgtttttgcaactgttctgaagtaattccggtaagttcagtaattttggatggtactgaatccacacttcgaattaatttttcaaattgcagtaattgtccgtcgggcattatcttggctgctccaattgaaataatttctgctttagtactatccaatccagttgtttctaaatcaagtgccaccaaaggttttgataatataggctttacatcttttcgatatttagtcatacgtcgatgtgacattgtcatccctttatggaatttggccgcactactgaatccatgtttaactggcacctcttgttgctttaaatgcatcattaagggtataccatcataatcgaccacttgtcgatccttacgtgttgtccgaaactgatagcctaattcagtggcagtattatacgccattgttgcttcaccagtcccaatatttttcaaaatacgttcccagagtaggtcacggactcgtgcactgacattacctacatacacacctgtttgaatctcctgataccatttagtcaagtcaccacgaagtgaaggcggaactttagataaagtaacaacaatcattcgtcatcacctgccgttacatcatgatactgaactcccattttctgcataccaagtttatcatcccaaagttgaaataaatctgcgccatcttgacaatcatctatgtttaatagatttttcaaatcagtcaccatctgagacaatagtttaccgtctcgaaaggcatctcgcatagctaatcgtgttctagctgctagatcttcgtcttgactatattttgcagtcatttcgaatgcaacaggaatagagatttttgctttatacaaatctgcaaaatcgtaaacaaaagataaatcgtgacctgtatgtacaaatcccaagcctggtgatgcccctaacgccacaattacactataactcaatccgtaaagtgcttgatgtgctgcagtcaaagcttgattaattggtgtacccgactcaaaattatctggattatactcacgacgattccagggtacatttgtttttcttgattctttgtgataaacacttcgaactctagcaccttctttgccacgaagttcttgcatagacaaccccgaaacatcttgatcaggaaagcgcatctgatacatcttacgcgcaacagcaactctagtacgttgattcgaaactaattttgcttgtgcttgtaataaacgtgatgagtggttcaaagcgcgaccatgagcatatgcacgtactccttgctcaccaacccagactacagccatagctgaatctccaattaattccatagctctatgagttacattaaccccagggcccaacaataagacactcaccatagcagctggaatacatacaattccacgttgatccgtcacttgaatagcactatcctgcctattaacatcagcatgttctaaatataaaaaggtcatacgatcttgtacacgaccaagttcagaaatttctggcttattagcacccatttttctttctgacatattaagcctccggaataacagtcatcattcccataccaaaagctttctcacgtccaattccctttactaaagtctgtttaaaagtctctgcattttcaacgcgtaacagaccttcaaacgttactcgactgagacgaacggctcgtcctggattacggtgtaacattggccaatcacgttcgacaattttaaaagcgagcgtctgcgtttcatttaagtcattaacaccaacttgtttgaccaattcaaatccagacttatctgatcgatctaccaaccatttttcctgttgagtaactgtaacatgagggaaaactttcccacgtttttttccaggacgtgtaatcgtatgtgtgggattagccgtcaatcggaaacgcataatctgaccatcatgaattttgtctaagaatccatcgtatgatttagtcacaatagttcctgtaacaccatatttcaataaaaactcagaatcaggtatggattcactcatgatcaataaatactttttccccgctaatgtatccaaacgccacaaatgtctatgacgttctccggtcgctatttcctttggaaagctctgctcaacccagttatgatatgcacctaaatgagtaagatctttgatttttgcacgattttgaacatcaacttcaactcttgataaataatacatagactacccccctttctaaagtgcacttaatgcatcatgttctgttgattcatcaactgctatacaagaatatgtcagttgaactcgttctgttgacattgctcgataaccaaagtatcgatttctttgatcaaatgaacccactcgatctttaaccattacactatgatgatcgttaagtaaatttgcatctgcatatatatcaactttgggaaacattttaccaggattttgttttcgataaactttttgagaccaaggtgaaacttgccaacctaaattttccagaactgttacagggtttttatcgtcaagttcttccattagaagaactcctgctggaacattagctcgacgccccaagaataactgataatgcggatgacgcagtgcattgtgaatttttgtaatttgttgatcatcattacttcccacggcaactacaaatactgcatcttgtatgtaatcgcgataagtaattttgcgaacattctttttccattcaacagtatgaaaatcagttaacatttgtccagcttggtcaattcgtacagcaaaattcaaatcattcaattgcgagattcgtggatcctctcttgaataacccaaagccgctgcaatcattccaataattgaactttttgaaggataatctccggttgtccgccgttcaaacgtagcctcatcaccataggattgtaaaggcgacgtcaatctaatcgttagtattttcatcctcaaccaccttcgtcaactccgtcgtaacctgttccaagagatcagacaagtttgttgctgtcttgctagcttctgtactgtatttactcaaagctaccgtcaataacggttgatctacaaaatccagtgtctgcttatactcgttctctattcgttcaacagatttttcaacataaccatcgttagatacaactggtttttcgaatgccgaaactaaattgacaggtgtatcttgtcgaatcgtaaccatgacatagtttggaagcgttttgtttgcaaaagtattctgttttccagttggcattgatagggcaaaatctttgataaaagcagatataccagcgatggcatcttctttattcagattatgtactaattcattgacattcacgttagcataccgatatagtgtggccgaattaaactcaatagttcctaacatagcggctccactagtatcttcaccttgttcatcatctaaggcagtaaagtaatcatattcaggaatcacttcatgagttgaaattgcatgagcaacttgtgaggcggcatcaacatttaattcaggattatcagctaccattcgaccaaataaagctaaatcgagggattggtctcccttaagaacttttttaatttcttttttatcgagttcatcattattgagtatatactgagccaattttttaatttgaccattactaattaaaagtaaagcacccgtctcattatttttgtcaaccttgatgccagctgatttaaaagcttcattagctttggttaaagcagcttcttcatcaagagaaccatcttgcttacgtaactcattagccaataattgaacagactcttttgttcgtgaactaaatgtcacatgatcttccttaaatgcatggcgtacgacgtgtttccaactttgtgaagaaactcgagctctcgtaacaccaccatacaaagcggtcttaggtgctcctgtatcatctcgatttaaattagatgatggaacagtttgaatgatatttatgtctaaatataaattattggtcattagtttttctccccttcagttgttttctgatttttcgtgctccaatagtactgctgcccccagcgcaaatgaacttggttcgcaacatcaacaccaaattgtgcatcatataaatcttgtgctaataaggcataatcaattctaattgttggattagtggcttttaaaatactaaccaaatgagataaagactgaatcatactagccacattacttgttgccaagagtgctttcactcgacgatccagagcttcttgacgatctggttgatttcttaactgagcaagcgctttaaataaactcactcctttattctcatcatccccgtgaactgaactgtaaacaaattgtgtttgtccttgttgatgaatcgcataaaaacgaatggctgcatatactgccgtttccgcataagtgggacgaccatcgcgacttaacatcttttcatccagattagccatcatcactggccaaacagactgtgcttgccgacttaacagcgtagcagcacctcgaacatttgataaaacagctttgtctggttttccatctctccaaagactccgaattattctatcggtaaccttttctatttttcccataacgatatatcactccttatcctgaggccctaaatgtatgcgaacattataatttagtcttcttcgagcggtaaaaatattcaacaaacggcctttatcatcctcaataccactgacgtccctaggagaactagacttcatgacatcacgaactgtgtcatttaaaatatcttctaattgctctttccattgttcaattttttgttctctgtcatcatcaccagtcaattgggatagccattctttaaatggagcattcaatttctgataaaaactggcacttaaattgctggcaaatgaacgcgcatccacattacgtatttgaccaattgttgaagcaaaatggtaaaaatctgttccaatcatttgagttgtatctatagcatcttcaattcgtacaggccaatattccgcaatttcaggatcaaacaacacgtctgattgtaatcgtatatcatcggctacttcaaccgctggagcctgtgaggtcgcattaccatcgctgatcagagttgttgaagctaatgttaacaattgatcatctgcaatgactgatgtatcttgatcttttatatcatgcaaccaactaacaattccaggttccaattgtcctgaattgctgtgaacatcaacgtaattaccaaagtttctccacatagaaatactcaacgagcgaagactcttaacagcaggacgatattcccctgtttttttgtctactctccacgttgtcattggctcaataaaagcacccgtagcttcaaaaattggaatccctgcactaaaaattaatggatgcttattatcttgccattcaatatgaagaattcgtgaccaagttgtataaagctctgctagattatccggtaccacctgttgtttacgaacagcaatgtaatcttgaatctcatactcccaaactggcttttgtaaggctaacgggtctacttgttcaccacctaatttcagattcaacattagagtttcaaatacagtctgtccttgggcataaactggattgatccgatacaaccaacccgcagaattggaaaacttttctttcgtctcaattttggttttgtcagttacacctgtaaagttttgataagtaatcaaccaacgcacaagttcatcaatatcaattgaattcttccgttcgcccgtttttggagcaaaaattgatggcgtattcccactttccgaaatacgtcgattaagttgtttaactagtacctgaccttttcctttttcgactcgtttattactaggaactagagcgtcatagtcagcggtcgtcacttgataaaagggatgatcaccaaacatatcaaagcgattatcgtaacacttcaaataatctgtcacaattttagaaaattttcctgctcgatagagtttgttccacgtatcgagtaaatcttcattaatatcctcagcatctgtatcatcatcaacatctgttgcttgcattgtgtcagaatccacggtaatccaagaatatggcatattgccagcattataacgcgaatatactgtagtcaaaattgctaacaaaaaacgcataattgctaaatcctgtgagcgcatttctccggccaattgacgatagtcttgtgcatgactaaaaaattcaatcagtgatacagacttctcccgtcctgtatcagtctgtatcactttaatccaaggatctgttgtcaaattaaagctctgactcatcatatttactcatcctcctttgtataatttaatcctaaatcttctgaatacattaatcgccagttgccaagagttgctgataaattatcatccaacggcaatgccaaggccccacttaaccatgggctctcttgccatttatcaaagtattctgcagttttatcttctagatcatttataactttagtaatcacggtagcattaggcgtaatggccattggtagacgaattacttgttcagatatttcacgatctgaaacgtctcttaatgaccgtccatccactaaatattgtccttttgctgtacattgtatcaagataacctcaaccgtttcttgaatatctcttaccgccgcattagcactttgttcatctttatttaaattacggaaatcataatctaaccaaccatgaatagtcgatttaagtctaaattttggtgccgcaatttggaaaacatttgaacgctgtttttcttgtgcttgatctttatctaacttaattctcgattctccgatttctggaattaaatcatccgtttttggatcgtatacttcctgtactaacttggaaatatcgttcggtagagttaccgtatcttgcaaaaaatagtcagtcttcatcaaaagatacttttcataaatagcttcattagcatcgccatattcatatggggcttgaattcccataacaaataattctggaatattcaaagtttcaggtctttgaatatcatgccgatgtaaacgaccagcacgttgtaaaatcaaatcaatgggagcaatatccgtatataaaacatcaaaatcaatatcaagcgactgttccaatacttgagttccaatcacaatcattttgtgtgggcgatgaccgtctttaccaataagtctttgcaatttttcctcttgcttagacctttcaggtgctaagaatgcggagtgcaataccatcaagggagtatcgcccatagtttgattctgctgaaatgctttggcaagaacttgtgctcttttaacagtattgacaataataccagctactccgccctgttttattttatctgtaactgcttgaaccaattcttcatcattcacgtttaaacgttgtacatgcaaatgagtagatttttgattcttctgatcaaatttagttagttgttttaattcaggtccgtccaaaattgtcagtaacggataagcttgcgttgtcttccatccatctttaacaattaatcgattctgatagtttaaaccatattttccttttaagtacgctttaaccagctgatttcgtttttcaactggcaaagttgcagagagaataattaccggcacatgataagctcctaaccagttcatagctttaaagagataactagacatatatgtatcatacgcatgtacctcatcaataacgacaacttttccactgaatccaagatgacgtaaaaaaagatgcttcttttttagtcccatacgtaatagattatcaatagttcctactgtaaaatctgtcagaattgattttttacctgtaaaccaactgttaacaaccactgatccagtttgatgttgcttgccattttcactctgctcataaatattgctagcctctggcaaattagtgaattctgaattatattgtcgtttactctgcatcaaatcaatttgtaatttttttccttcatcatcagccaaaaattttgtccactcaagcactcgcgtaaacatagcattggttgttgcttgcgttggcaaccccataaaaaatccatttctgccagttttatacgcaagttgttccgctgcaattaaagatatttctgtttttccaaggcccatacccgcttcaacaattacaagtccgggatcagttgtagcctgaattgcttgagtcatagctaattgaaccgggcgtggagtatatccccaatgattaaaatatggattagtattatcattcagtatcaccctttgtggaacccatttgtctgattgcttccacgttaaaatggcattctcaaatcgacttgtcatatctatgtcttgataaccttgatcaagcccaattagtggaaacagaggtttagatcgatcttcattcaaccactcacttgaagatagccaatctgccataatcagaagtccttctaagataactgcctgtggttgtccaacctctggaatttcaccagcctcagtatatccagctaaattcattccataatcaaataaccgttgtcgagtatcttgccaagcttgtttttcttcctgtcgacgttcttcctcaataggatctttaacatgcccatcaacttgatcgtagttggcagtataattttccaattgaattctgagattatgtttttcagccggtttaccatgatgacctccaatgatagcccctacggaagcaggaatattaaatgcatcactttctaagattgcttctccagctaatgcatgaggtgatttttgtggagatgataatccagatactcgtaattcagaaaaaccatttcgattcaagcgttcaatcaactcttcatcaagcgaggcattattatcgtaagatttttttgtttgaaaagctggtgtggctttcccaatatcatgaaagaatcccaaaaatttaattagcttttgcatgtcttcttcagaaaccgactgagttaacaattctctttgaccggcatttaaccaatgataaaaaagccaattcatcacatgactgcaatctactaagtgggcaactaatggaagccacaacatttccccatcatctacatgtttttttgcccataaactagtttctctactcgttaattttactgacatttaatatttcccctttttagagagattatctttcaaatgtatctacgcaaacggcaatgtaatcgttatctttattatgccactattaatatagttagacttgtaagaaatgaaaatttactttctaatatctaacctcattacaaattagctcatgactaaatctatttacggtacaatttcacttctgaaaaaattatgataaaaaagagcacttggccctaattaaaaccatcccatgtatatggggaacaccttaaaagcattattgaatttttgcgatgaatagaatcatccccatatacatggggagtacacggacaaccatgctgttatcactagtggacaagaatcatccccatatacatggggagtactgaaatggtgggcgtggaattgcgccacgcttagaatcatccccatatacatggggagtaccagttaggtattggcattaatgtgtctgataaggaatcatccccatatacatggggagtacaaggctagtcgcggtcgcactaaactaattaaggaatcatccccatatacatggggagtacattgtcagttttgtaatacgtgtcaaagtaccagaatcatccccatatacatggggagtacggtctgattgactgatggagtctgctggtctgagaatcatccccatatacatggggagtactcggccgttctgctggaactggatcaccttttagaatcatccccatatacatggggagtacgttatctggttatcatcgagccacacgagcccagaatcatccccatatacatggggagtacttaagtctgccacatcaagcgtctggaatggcagaatcatccccatatacatggggagtactatataaatgaatattatcgaattgtaatattggaatcatccccatatacatggggagtactgcgctagggtctgagccgttgttgccgttttggaatcatccccatatacatggggagtaccttattgattagatatatattatcattagactagaatcatccccatatacatggggagtaccaactcacaatcccttataacgctttatatttggaatcatccccatatacatggggagtacttattctcttttggtacatacaatgtaacgctggaatcatccccatatacatggggagtacccaaaattataactaaaaaggacggtaaaaatagaatcatccccatatacatggggagtactgtgttggtaaccttgacgaaggttgttcgatagaatcatccccatatacatggggagtactcatttcagcaatagacgggaacgtttttacgagaatcatccccatatacatggggagtaccttgttttgattgctgttgcgaattccttgccggaatcatccccatatacatggggagtacattataatgtaccacccaccatgataactaacggaatcatccccatatacatggggagtactatcttattattagattgtagttataatatcaagaatcatccccatatacatggggagtaccgcttagttaaatcagaaatgaagtatgaacaagaatcatccccatatacatggggagtacgaattaattaaattggaggaattaagcatgacagaatcatccccatatacatggggagtacttcttcgcgctttcaaattcgatggactcgccagaatcatccccatatacatggggagtacagtgttaattatcacttcaaacttgctgtttaagaatcatccccatatacatggggagtactgtctaaaatcttggttaagaaccctaatttgagaatcatccccatatacatggggagtactgccactgattgatatggtagtcggctttattagaatcatccccatatacatggggagtaccaggttacaatccattagcaatgttctcgtcaggaatcatccccatatacatggggagtacgtgggttattacacccgataaccataaaacgtggaatcatccccatatacatggggagtactatcagttttataagaaccgcgcttgtttacaggaatcatccccatatacatggggagtacaacatagttgatatctgcgattgtatcagttaagaatcatccccatatacatggggagtactgacacacttacgatgttttaagcattgcaacggaatcatccccatatacatggggagtactgaacggcaacgaaatcccagacacaaatattggaatcatccccatatacatggggagtaccgatctactaaatcaatggtacgtttttgaatagaatcatccccatatacatggggagtactatgaatcaagtaatttccgatggacagttagggaatcatccccatatacatggggagtaccatctaaattggcaaaagtttcagggacagcaggaatcatccccatatacatggggagtacactaagaaaagactgttagatcaacattttaaaattagaaaaccacttatttttattaactggtccaataagattaccaatttcttaaatcatacctttctttcctgttctatgcaacgctattttcaatagtttcaatgactaataaaaaatactctaaatatctatgtctataaatttttcaaaaactcaaagttctaagatgtcgatccaaataaaaaggtagaagtaatatttcaaacgaagtcttacttctacctttttgaactaaatggagttcttaccaatatctcgtcgataaaaaatatttgtttgatccggcaaattacaagtttaatccgaacaagcccggaatctttcaatggcagtctgttgatgatgtatttttaatggtcgttgattaattagttcaagtgctgctaggatctcatcagtcgttacttggctaaaattggtctttttcgggaagaaccagcgtaaccgtctattaaaatattcattggaatttataaggatttttactagggggaatcggtttgaacgcaagtgagagtatttttctaacgcaagcggaaaatgataagtacgccttattaatggagattgttggtttaaaacgggatgagttgcctgttaaaaagcggattgaactatcgcgtaataatcagccgctcgttgaagatgtgaatctaaaacaagtagcaatgctattaaatcgcagttacggtagcttgtacaatatgtacatgagcattattggggacctaaaggaaattatcggaccggatgttgatgatattaaaaccttgttcagcgttccaacagatgcctatcactatttattagtgaataagtcagaagcgtttgattttatcaaaatcttactcaagggtgagaccgttacattccaagaattctgggaagcccatgatacgagtaaggcaacggcgctacgccatttaaaaggggtgcgcgacttaattcgctcatttgatatccgtatgtattatgattcacttcggttagaaggcgacgaaagtaaaattcatttagtcttaacgatgttattctggatggcaacggaagggcatacctggccctttgaagatgttaaacgagacgatgcacttaaggcgttcgatgttgcgattgatcggttccaattggaaaaaaccaatattttgacccgtgaactaggggcgtattcaatcgtcgtaacctatttccgattactacaaggtcacacggtttcaactgaactagatggcgattttatccgttatccagttcccaatatggtttctgaatatctaaaatagccctttgaagaccaagctttacggatcaagagcattcttgcacaaatgacccaagaagaagcgatggctgaatcattcaatatatatgacatcattaattttggaccgattcagattcaggatgctaatccctacatggaatcttacgaaacgcgatacaagcggtatattccagtgatttacgaatttgtagaagcttttattgatcaaattccatttgatatcaagaaatacctaaacttagacgatgcgaattatcaaggtttcgtgcaaacgatgatttcgatgacgatgaccacttacatgtttaaacaagatgtgacatcggtgctcgctgaccaaatgatggaaagtgttgaatatctcaagccaaatgatgtcctaaaataaaatattgatgatacggtggattacttattaatcaatccgaaagtgtcattcttagtcaaattacgtgaagaattggtcagtggttactacaacgtcttgcgtcagatgattcaacggtttgcaccgatgaataaagtgaaggttgtcgttgtgacggaacaatccttcctcgggtactttgatttgatgactgcactgaatagtgttttgtatgtggatgttagtcaatctgacgcggatttaatggatgctgatatggtggttacgacttcgagcattgatttaactggcatcgttaacccagaagcggtgatgtttaaatggcatcaaaatgcagatagcgatcattttggacgtatgctcggtttattacggggtctatggattcaaaaatcatctattgatgattgaatttaaagattaaatgcggtattcttacattaagaagtaaacacgtgaataagcgcctatatggattgacagagagataccggttggtggaaggtattgaatccagcattccagcgcaatagtgggtagtgatgaactacacggttcctggccgttatcagtaattgagggcacctattatttgtagtgggtgaacttgggtggtaccgcgaattgaagtcttttcgtcccaattaagggatgagaaggctttttttattgttgttaattaaagatcattaaaaggagagagtgcaatgttagatattaaagtcattcgagaaaatgtccaatgggcaaaggataagttagctagccgcggtgttcaagctgcagaaattgatgaggtcatcgcattagatgaaaaacgccgtgccttaattgtgaagaccgaagaattgaagaaaaatcgcaatgctgcctcagaagccatcgccgttgccaagcgcaataaagaagatgcgactgaacaaatcgctgccatgaagaatgttggggccgaaatcaaggctttggatagcgaattggctgaagtgaaggccaaagtggactacatcttagtccgcttacccaacttcccagatgattcagcacccgttggcccagatgaaagttttagccgtgaagaacgcaaatggtcaacaccccgtgaatttgattttgaaccattagcacactgggatatcggtgaaaaattaggcatcttagactttgaacgcgccgctaaagtatcaggtagtcgctttgtttactataagggtgccggtgcacgtcttgaacgggccatttataacttcatgttggatcaacatgctaaagaaggctatgaagaaatgattacgccgtacttagtgaatggcgaatcaatgtttgggactggccaatttcctaagtttacggaagatgtttacacaatgaccaacgaaggcgaacccatgactttgattccaaccgccgaagtgccattgacgaacttctaccgcgacgaaatcttggatggcgcacaattgccaatctacttcactgccttatcaccagctttccgttcagaagcaggaagtgccggccgtgatacccgtggtttaatccggatgcatcaatttaacaaagttgaaatggtgaaattcacgaaaccagaagaatcattcaatgaactagaaaaaatgaccgccgatgctgaaaatatcttaaaagcattgaacttgccatatcacgtcatcacattggcaactggcgatgccagcttcacatcagctaagacatacgatatcgaagtttggttaccagctcaaaatacgtaccgtgaaatctcaagttgttcagattgtacagacttccaagcacgccgcgcccaaattcgttaccgtgacgaagatggccacgtcaacttggtccacacattgaacggttcaggcttagcagtcggccggacagttgccgccatcttggaaaactatcaaaacgaagacggcagcgtcacaatcccagaacaattggtaccatacatgggcggcatgacgaagattgaaacaaaataattaatttaataggaagtcatttgtttcttccataagggagacggttgttatataaataacgaccgtctttttttgttagattagaaacagttgtgaatagagaatagtttggcgcataagacttgaaatttaaatgaaaaaaggttagactaatttagttatcgtggatattgaatgtaatcaattaagcaacttatataattaaaggagattttagcatgaagatgatccaaaacgaatttaagttcattgccaagaatcgtttaatcatgatttcgttaatcgcaatcgtgtttattccattcttgtacagtatctttttccttaaatctgtctgggatccttatggtagcactggtgaattaccagtcgctgtcgttaataatgatcaaccagccacttacaacggtgaaacgttgagcgctggtaaagatatggtaaaagaattgaagaaaaacgaccaacttggttggcgtttcgtatcagcaaaaaaagcacaacaagggcttaaagataaggaatactacactgtagtgaccctacctaagaacttctctgccaatgctgctacagtcttggataagaatcctaagaagatgcaaattcaatacaaaaccaacgattcattgaacttcatcggtgaagttatcagtgaaatgggtgccaaggaattgaacgcccaagttcgggaaactgtcacaaatgcttacgctaaagtgatgttcaaacaggttaagactgccggtaaagggttcagtactgctgccaagggtgctaaacaattaacagacggttctgtaacgttatcagatggtttaaatgtttatacagccggtgttgctcaagtcaacgatggtatcatgacgatgaaaacaagcgttgtgccattatcagatggtgttaaacaattagctgatggctcaaacacacttaacaacggcttactattattagatagcaagacgggtgcactcgcatcaggcgcaagccaattgaatgatggtgcaagccaaattagtagtggtgttacagcttatacaaacggagttggcgcgttgggcactggtttaaacacgcttaatggcttctcaaatcaacttagctcgggtgccacaagtttggcatcttcaacaagccaacttcccgccggtgtcgcaggcttatatgttttaaattcagtgatgaaccaaggaattggtcaaattaatactcaattaagcaatcaaacggatttaatgcaaaaatttgcccaaatgcctgcaacgatgaagagtgttaacgcacaatctaaacagttagcaacaatgttaaacgaattgcaaccaagtatggcggtattagttcaattagataatgcctataaagaaaataaagcagcgttagctcaattgccagctttaagttctcaattatcagcgtttgaaacaacattgaatacctcagctaatacaattgctggtaactcgcagacaacattagctgacgtacaaacaattagtgcagattcagctaacttaagtcctgcaagtcaaaaagcattacaagatattcaggctaaggcaggttcaaacttaacttcagtgcaaacaattgctgcagcaagtgaacaattaaatgttggacaaataacagggatgattaaccaattaacgccattacttggtcaaatgggtcaattagataacgctgttgctcaactaacagaattaagtacgaagtcacaacaattattaacaatgagtgacgcattaacgaatcaacaaatgcgagatcaaatttctggcttaatggttcaaatgcaacaattaacagctggtatcgctcaattgaatgctgcatcaactcaagcaacaggaattgcaacgcaattaaaccaaggtgtaaatggtcctaataatacgccagcaattaatgcagctgaattaacttcaaaagcagaaattagtaataaagtaatggggattgctagtcaatcaacgatgacaccacagattaataccttagtaacaggaattaatggttatactgacggtgttaaatcagcaacaagcggtgttggtcaattaacagctcaaagctctaaattagtagctggtggacaacaacttgctgccggtactggtgctttaaatgcccaagtacctcaattgacaagtggtatcagtcaattagcaactggttcaacagccttgaacaatggtcttggtcaattaaatggtcaaattccaacgttaacaagcggtgttgatcaattagctgctggtacaaatcaattaacggataactcagctaagttaacagatggtgctggtcaattaacagatggtaataagacattagcatctgcattgaaatctggtgcaaatgaagttaactcaattcaattaacggataagacagccgatatgtttgctgcacctgctgaattgaaacattcaaattacagctatgtgcctaactacggtcatgccttagcaccttacgtcctttcagtagcattgttcgttggcgcaattgtcttcaactttgcttatccaattcggaagatctcaatgactggtcaatcatcaacagcatggttcttaagtaaaatcacggttggcgctttagtcgctgtcgggatggcaattatcgaacctgccttaatgatggttgctggattaaacgtcgatcatccagcacaattcttcctaatggcaattaccttctcacttgcttcgatgtcgatcattatgttcttatcaatgacatttgataatcctggtcgtttcttagcaatggtcctcttgatgcttcaattagggggttcaggtggtacattcccaatggaaatcacgaaccacttctacaacgtcattcacccattcttaccaatgacgtattcaattctagggctcagagaagcaattacatctggtttaggtaccggtcaaattgttcaatcattctttgttctcttagccttcatcatcgtagcactcttgctattatggttaggaatgaatcatttacaaaaaatcggcaacggtggtcgctcacaattagacgacaaccaaaaattacaagatgtcgaaaaataatcaatagaaaaagcctgtcagctaaatgctggcaggctttttttagtgcaattaagtattcttaacgtctaagaatgtataaccgcggcgatcataacggttgcggcttcttgagtattcaatcggttggccattatcgagataaacaacttgctcaacttctaagacgggatcagttggggcgcagtccagatattgctggtcatattcatcggccttatcggcttgaatattacgaaaggcgcccgcgaacgtgaggtgtaggttctccttaaggtaggtgtagattgactgtgcgagaacatcatcagttaatccgggaactaggctcactggcatgtaggtatgttcgaggacgctattaacgccgtcgataatccgcagtcgaatgattttgtagacgggctgttgatcagcaagcattaagcgctctttaatctcaggtgttgggaaagtcacctcaaacgtgatgatcttacttgagagtgttttaccaatgtcggctaagtcacgtgacatcccacggtattgatccgccggtgccgttgatttattccaaaaagagtggtctaacacctttgtaccagcgccgcgtcgtgatagaacgagtccttccatcgttaaaatcgtgattgcttttttgatcgtcattcgactggcatcgaattcttgaactaagtcggtttgattgggtaacaacgtattagcaggatagcgcccttgtttaatccgttgtcgaataatgttggcaatttcttcgtattttggcaaaaaaaataccccgctttctacttatagtttagtggaaacaacggggtaaaacaatctttagtttgcgagagggtctttttggcgatctagcattttaatgaatgggaaccagatgagaccgactagcacaacgtcaatgagttgtaagatcccgccgagtactgagttggttgcgagcatcccactgaagaagattgggacggtccatgggactgaaaccccagttggcgtaggcaccaatccgattgccattacagtgtagttgagcgctgtgacaatcagtggtgcaatcagccatggaatgaaaattgtggcgtttaaaacgattgggaacccgaaaatgacaggttcgttaacgttgaagacagcgggtgccaaggccaaacgtccgacatcgcggtattgttttttcttcatgataaaggccatcagtaagacgacggctaatgtcatcccagaaccaccgagacctacggtgaaagtttccatgaatggtttcgtgacaatatgtggtaaagcatggccagctttgtaagcttccaagttttcgagcattaatgtgttccagatcggatccattacagagttgacgataatttgcccgtgaagaccgaagaaccagagcaattggacaaagaacaatgcgattagggttgcaggaagactgccacctaaaccaacgagtggtttttgaataatttcatagatcacgtcgtgcaagtttacgtggaataaaccagtgactgccgcttgaatgactaagaaaatggttaaggttaaaatagctggaattaaagcggcgaatgatttcgcaactgcaggtgggacaccgtctggcatcttaatttgccagccttttttagtaatccggcaataaatttctgcagcgataaatgccgcaatcatcccaatgaacatccctttagcgccaagtcgatcgagacttaaaacaccgctaacgtcaacgcctttatcggtggtcatcatgaatggggtgaggattaggaaactggcgaatgaaacagcaccgccgaaaattccgtccacatcatatgaattagaaagataataaccaatcccgaatgtgacgaagaccgtcatgattgacattgtggcattttgtccattaccaaggagttccgttagggtcgctttggtggcatcgttgaaaaatggcaggttagtgataacgacgatgattgatccaaacatcgtcaatgggaatgaaagcataaatgcgtctcgtagaacagttaggtaacgattttggcctaacttatttgcgaaaggcatgattttcttgctaagcgtgtccataaaagtattcacgtagagcaccgtcctttacatgtgtttgcaatcgattacattctcaatatagcacgctctttttgaaaagtctatacatttaaataaaagagttggttttttaaaaagaagctgatatactgaggctattcaaacaagaaggagtgctagcgatgactttttatgactttccaaaggatttttggtggggttcagcagcaagtggtccccaaacagaaggccggattgacggtgatggtaagggcgataatatttgggattattggtatcaacaagcgccagaaaagttttttaaccaagtgggcccagcgcggacctctgatgtgtatcaacaattcaaaagtgatatccaattgatgaaacaaacaggacacaatagttttcggacatcgattcaatggagtcggttgtttccacaaggtacgggggagattaatctacaagctgtcgatttttataatgcgtacatcgacgaattaatcgcaaacggcatcgaaccgtttatgaatttataccattttgatatgccgctagcactccagaaaaaaggtggttggctcaatcgtgagacgattgatgcttacgttcattatgctgaaacctgttttgaattatttggggatcgggtgaagaaatggttcacacacaatgaaccgattgtgccggttgaaggcggctatttatatcagttccattatccagctgaaattaatttagcgcatgcggtacaagttggttatcacgaaacattagcgagtgcgatggcgattcaaaaatatcacgcacgcaatcaagggggacaaattggcattatccttaacttaaccccaagttatcctcgggatgcgactaatccggcagatgtgaaagccgcacaagttgcagatgcttttttcaaccgttcattcttagatcctgccgtgaagggggaattccccgctgatttggtcgcgattttaaaagatctagccatcttacccgactatcaaccagctgacttggcagtgattaaggcgaatactgtggatttattggggattaattattatcaaccacggcgcgtgaaggccaaggaaaccccaatcgaccatacaaacggcccgatgccggatgattttttcgacaattacgatatgccgggtaagaaagtcaatccgtatcgcgggtgggaaatctacgaacgtgggatttacgatattttaaagaacgtccgcgaaaattacggcaacattgcttgcttcatttcggaaaacgggatgggcgttgaaggcgaagaacgttatcgcaatgccgatggccagattgatgatgactaccggattgaatttgtacaggatcatttgaagtatgtccatcaagccctccaagaagggagtagctgtctcggttatcatatgtggacgtgtatggataactggtcatggaccaacgcctataagaaccgctacggttttattgcggtggacttagaccatgattgccaacggacgattaaaaaatcaggtcattggttcaagcaagtcgctgatcaaaatgggtttgaagcctaatcgaattgaaaaagcacaatcgacgaaacaatcgttgattgtgcttttttgtctgttatattcgggtaaacttgataaccatcaagttcttaaaatcggctttcttctatactaaagacaatcgttaggaagaagggattttaaatgaaatttcaaagatggttacaatccgtgaagaatcagattgcgctgactgttggcggattgattgcagtggcctatggctggtattggcttggtggggcggtaattgtgatgcaagggctgttattggttgcgtcaatgatgggggttgcaccgattttgatgcaggcgtatcaagcgctaaaagtgaaagtcatcagcattgatttgctggtcacgattgcggtattgggagcgctaatcattggtgagttcaatgaatcggcgattgtcacgttcctctttttattcgggagctatcttgaacaacgaaccttgaaaaagacacgagaatcaattcgcgcattgtctgaaatggcgccacaaacggcacaagtgttagcggccgatggcactactacgacggtagatgttgatgatgtcgaaatcgatgatcaagtattggttaaagctggcgctcaggtgccggttgatgggcaagtcgtccaaggtagtgcctatgtcaatgaagctagcatcactggcgaagcacaactcgttaagaaaatagtgggtgatgctgtttattccggggcaattgtggataacgggacattgacggttaccgcaacgcaggttggggatgatacaacttttgcccaaattattgaattggttgaagaggcccaagatagtaagtcacccgcggaaaaattcattgatcgttttgcgacctattacacaccggccgttttagtgttggcattagcgattggcttaatcacgcgcgactttaaactcgcgattacgattctggtgcttggttgtccaggtgcgctagtaattggtgcgccagtttcaatcgtggcggggattggcaatggcgcgaagcatggggttttgattaaaggcggcgaagtcgttaatgcgatggctggcattgatacgatggtctttgataaaactggaacattgactaaaggggacacggcagttgcacatgtgcaattttatacagcggcagaacaagcaacgttggcagtgactaccgcggttgaagcacagtcagatcatccactggcgactgcgattgtgcagtatgcacgggaacaaggggtgacagacttaccaactattgaacgaattgaaacgctcaaagggttgggggtacaagctgaagtcgctggtcaaacaattcggattgggcgggccaagatgatgactgaagcagggatccggttaaccggtgcgcagattgcggcgatcacggccagtcaaacagcagggcaatcaaccgtattagtcgcagttgaccaacaagttgttttattaattgggattgctgatactgttaaaccggaagccaaggcagcattaacgcgtttgaaaaaagcgggcgttaaacatttagtcatgttgacgggcgataatgaccagacggccgcagcaattgccaaagccgtcgggattactgaataccacgcgaatcttttgccggcagagaaggttgaattcattaagacctaccaagcaaacggtcaaaaagtggcttttatcggggatgggattaatgatagtccttcgcttgcactggctgacattggaattgcgatgggttctgggacagatgtcgcgattgaaacttcggatattgtgttaatgcaatcgacgttatccgaattagtgtatgccgattacctcacgaaggcgacggcacgtaatacagttcaaaatattgtgattgctgttggaacggtcggattgttattgcttggcctgatgcttggctgggtacagatggctagtgggatgtttgttcatgagattagtattctggtcgtgattttcaatgcgatgcgcctgattcggtttaaagttcgctaaacttgatggcggtcaatttttaatcatgcagcgcgcgatatagtaacagtaatcaaacgaaaaggtggtcattgaaatggcaaaattggtgatgcaattagacgagctatcatgtccgtcatgtatgcaaaagattcaagcgggtgtcagtcaacaagatggggttgaatcagtgaaagttctctttaatgctagtaaagtgaaagcagaatatgatgaagccgtgacaaacccagatgaattaacacaagctgtaactgacttaggctacagcgttcaaagtatcaaagtgaaatagggggcaattaatatgttatctaatgaagaaatcgaaacacgttaccaagcagaagttaaacaagctgatgttgatcaccatacaccaaccgcgggtgccatgatcggccatgtgatggctaacttaacgattcaacggcgtaaactccgtcaaatgaagtggtacgctaaaggaatcaataaccaagcttttaaagcgcaattaaccacattgcttgcagaaaatgatatgctattagacaagacggccgaacggctactagacgaaggtgaagtgcttccgacgacgcaagctgagtataccgagtatgggatgctgacagaagagccgcggattaagtactgggagatgccagcgatgattgcggaaatggttgcggactataatactgctaatctatttgtttcccgtgcgattaaacttgcggaaaaagaagaacgatttgctttagcggcggatatggtttctttaatgggctacaaccaacaccaaatccgtgaattgcaaagccaactaggaaaagcagcgcgcgaaggattagatgaagaagacgacgattaagatagagggaagtgggctaggtgactgacgaacaacatatttgtgctgagatagtaccgatttttaatcatttagaccgtgatagtttggtcaagatttcggcagttacccatcatgaacgcgttaaaaaagggacgttggtgatgaacccgatggatcagaagcggttagtgatcttagctaaggggagcattaaggtctatcagctctctacagcaggcaaagagcaactgctacgcatgatggaacccggtgattttgaaggagaaaagttactttttaaaacggaagatgagccgttgtacggtgaggtcttgcaagatagtacaatctgtacgttatcgcggagtgcttttcaacagttactgttagcctatcccgaaattagtttaaagttactagaagcaactactgataagatgacgcgtttggaaaaacaggcgaacttaatcaatatcgagtcagttgaatccagaatcgtgacttatctacttgatttagctaaagcgagcggagaaactgaagtgatgattccgatgaagttaaaagaactggcaacatatattggaacaacgcctgaaaccttatcgcgtaagttaaaacagttagaaagtcatgcgctaattgaacgaaacggtcgaaagattgcgatattagactatgaaaacctagaagacttctattaggacgtgaagattctgcgaattttgcaggatctttttgtttacctataccaatttggataaaattggaacaaatagcagtttaaaagtattatgagggataatcaatagcgcagattagggatgagaatccgggtgatatgaattattttttcgatatttatacaggaattcaattttttgaatttttttcaaattagtgattgacgttgtcccactaggatggtaagatattctatgtcgtcgagagatgagcatgtagcaaaacgttgaatgaatattacttaaaaaaagttgttgacattcgggtttatacatgataagatagattgtgttgcttatgagttttaatttaatgagtgattaactaatatctgatgtagacctttgaaaactgaacaaagtttcgacaaaccaaatgtgtaaataaaaaaacttcgcctacacttaaaatttcaaatcccttgtatctcattagggttctacaattttaaacataaacaaagtttttcaacttttatcatttaatattcaacgaattaataaattgataatccacatatcggccttctccactattactattggaataacgactgattaaataaatattcttctgcttcagtttagcatcgagagaaactttaatatcgaagccactctgcgccgcattatcaacagttggatagacagctgcgacatcatttcgagtaatcctattaatgcgaacccgtccaatttctttattatttgctttattcattatgatgataaaattattatttaagccttgaacgttcttagaaatatgccatcccgaaatatggaggatattaccattttggataagttgatcaatacttcctaaattacttgggccttgtggtacgttaacaacattaggaaattgatagtcaacataatcactgttaccattcgtggtacttgtatagcgactaataacgtagaaattcttgccttctaaactcttatccaccgctaattcagcactaaaaccactcataccagaattatacacattaggatatacactatgaacatcatttctcaatgaattattaactttcaagcgcttaatttctttattagtatcgacattcattacaatcagataatgcgtattttttccttgtgcataatcactcgcatgccaaccattcattgaaattttatttgaattaactttaacgttatccaaactacctaaattttgcttagttggcgcaggaacttttacagtattaccgaaatcaaagtcttttgcactcccttcaccgcttggtaattgtgcataacgcgatataaccctataggtatgtccgtacattcctgagtctactgggatgttggcattaataccactcattgctgccgtgttaatagacggataggcatttgctacatcatctctcctaccacgattaattgcaatccttttatgttcttttcctgtattggtatcaattagaattaaataactgtacggtaaattattggcatcattaattgcatgccaaccaagcgcaaggatattattgctatttgcagttaattgatcaaggctaccgacattatccgttacttctcgatcccaacttgttaatccatactgctcaatcaaactgtttaacaaagtatcatagttaggcgctgtagcataaccgtcttgtttcaaaagactcgttacctcacgataattagttttccacaacaaattatgatatcgtgaatttactgccaaaaagttcccatgatcttcgatactttcattccaactattgtattttctaaattgcgcattaactgtaatccactgaccattaatatattcttgagtgggcattgttacgtactgaccattgtatgttcccttaattccaaataagttattaccatacgttgctaaagtcgattgcccccaaccgctctccaagattgcctgcgcacctgaaacagagggtaatacaccatacttgcgccatgacgaaattgcaccatcatgaatactactaataaaactggaggtatttcgtaataaattcattgaagctctggaggtatttcgtaataaattcattgaagctggcgtacttctttgacttactttaggcgcatcataaaacccaggaccaatttcattattttgctttacagtaacttcttccttgttctttgtttctgctgctgattcactatttttaattacaccggattcagttgaattatcggtagatggcttttgttctttagaactttgactacttgctgatataatactttcattactgctcattaatgcaggggctgtctcttgtttttgttcagccgctgatactcgttgatttgttgttaagccaattaaaccaatcgtactcattaaaatactattcttaacaatttttttcacttcacaagtcgctcctagttagttttttcagacatactaataatacaatacaattacttaaaacactatttcgttttagttacaaataaaaaccgaacatcttatccacacggttaagacgttcggcaatattttttagatgttcaaggcattgtcaaacacgtaatcaaccgtatttccctcacctgaaggattatctgaataacggctaatcacatatattcttttgttaaccaaactgttatcgatattaaacgttaaaccaaatccactgtttttagagccgtataatgttggatagacagcagctacatcatttcttaaagaacgattaattttataacgccgaatttctttgtttgttgtcttatccataataattaaataactatacggtttattaatcgaagcattagcagcatgccatcccgacattattacggtattatttacacgagacaattgatccatacttgcagcactttcaataacttgtttcttaggaactccaatttgattaatgaattgataatccacataatcagcatcagcatttgccgttgctgaataacgactaatgaagtaaatattcttgccttgtaattgactgtcaactgggatatctgcagaaaatccgctcagccccgccttatatagatcgggataagcagcagctacatcatttcttggtgagttggcgatagtcatccgtttaatttctttatgtgtattagcatccattacaattaaagtgtgaacattacggccttgtgcattatcatttgcttgccaaccgctgatgtgaacattattgaaacttgccgttagggtgtcaatactccctaaattttgtttaacaattgctggtactgttacctgattatcaaacgaatagtctacgtatgctccttcgccatttggtgtacttgagtaacgtgaaattactttatacgtattaccgcgcatatcatttgttactggaatactcaaaccaaacccacttttttctgcattggcaatattcggataaacttgtcgaacatcgtcacgttgcgtacggttaattgcatagcgcttatattcacggcctgtcttagcattaattacaattaaataactgtatggataccgactagaatccactgatgcgtgccaaccagacattgataatgtcttcttatcagcagttaatgaatccatacttgctacactggtttcttgcttaggtactttaataatatttctaaatgtgaaatcaacagtgtcggtattaccgttgggatctgacgagtagcgagacataagaacgtaactcctattatgcatattattatctaatgtcaatgtattgttaaatcctgaatgtaatgaattggtaatgttttcataaatgttatgcacatcttgacgatttacacgatttattttataccgttttacttctttatgtgtcttactatctaataagaataggtagctatatggccgattggctgtttgctgtgctgtatgccaacccaccacatgaatttcattttcagacacattaacactgttaaggctcgctttatttgcaggcatttgatcataataatgttgcactaatgcataaaattgattcatgtcatacccatattttgcaaagtaagcatctggatcagtatggtctgttccaccaagatattgtgtaacattatgatgtgaccagattgtaccaaccccattatgattctgtgccaaagatggcgttaaattatatttgtttaacaagtaagcagtgtaccacgctgagtaactcgttgtcttagcaaaatcttcgaagttacgagccgttaccatttcaaattgggcaaaatatttattaccaactgccccactaccccatgcaccataatctgtatcatgaatgtttaatattgtcctagcatcaataaaggtatgaacaaatgctgattgccacccaccattaatctcatagtctgcttcactccgagcactataattattagggttatcagtataatgaacaaccactccgttaggacgattatcatctgttttataattaaatattgagaatgtatgcaaatcttgcgtaatgtttggatgtaagtagttgtgttgatatatataattattgacacttggataacctgctttaggcataatcgcctttttaaccttagatgaatcaataggcatcccaatatcgtcagtcttcgcttttttctcttttataggtgttgcttcttttgtatcttgactatttagttgcgttttcatttcatctggcgttagcacttgtccagcttgaacattgtttgtagcaaacaaaaaggtcgccgagaccattgtaaatccaattaagaacttcgttagttttctattcattttttcccctctagaatccttaattaacttccacgtagaatattaacataaactttaatatttttacagtctgttcagcattattaatcatataaacatttattggctattaatcaaaaaaaacgtcctgaaccttatcggttcaggacgttttaattatctttccaaataaaactcaaatcgttcgcccacatattgggtgcggacatattcgaaaggttcgccgtttgataagaaggaaacttgtcgtaatttcaagattgggccattacgcttaatgtcgagatattcggcaattcgttctgaggcgagttgggctgagacggtttgttgtgcaccgcccatttcgtagccccctttttcggctaatgctttatagaaggaagacgtgatttcagctttactgaaatcggcaactaagctttgtggcacggttgccacttcaaaacagatgggcacattgtcggcatagcgaatccgttccatgcggagcacctgctcgccatcttttaactggagcttttcagcttcgctaagtgatgggttggcaatgtggaacgaaatggttttactagatggctgcttaccttgggcagtcattagatcggtaaaactagtgacgccggacattttttcttgcaccttttggttagcgacatatgtcccagccccaatacggcgttccaaaattccttcgtcgaccaatgtttgaacagcttgccgtaatgtcattcgtgagacttcgaaatttaaagcaagctcccgttctgaaggaattcgatctccaatcgaccacttgccggcttcaatatcctttttaagttgattatgaatttgaatataaacaggtgattccatgggacacactcctaaatattaatgttgatagccgttcccaaagctgtaagttgcgactaagttttgctgatggtctaagatgttgaaatcagcatcccgaccttcttctaatttacctttttgtgttaagccaaattcttcggcttggttgacacttgacatcataacggcttcaaacgtttcacaacctgtgaatgtttggatgttcttgaaggcatcgatatatgttaacactgatccggctaaagtgccatcttctaagcgtgcttgtttgtctttaacaatgactttttgaccgcctaattcgctttcgccttcagcaatccctttagcccgcattgaatcagtcacaaggtcgatgcgttctgcacctttttgttcgtaagctaatttaatcatgtcaggcacgatatggaaaccatcagcgattaattcagcgtacatgttgtcttctaacattgcgtgacctgtaacgccaggttcgcggtgcttgaattcacgttgggcattgtataaatgggtaacgtgcgttgctttactttcaagcatttgttcacgcgttgcattactatgaccaactgaaggcacgatgttgtgtgctaagcagtagtcttcgaatgcttttgaaccaggatcttctggtgcataagtaattaaacggacacggttacctgataacttattccattcgtccaataaatcaacgtctggatctttgatgaattgttctggttgagcacccttgaagattggtgcgatgaatgggccttccaaatgaacaccttgaattaatgggttcttttcagccgctgctttaacaccgcgcatagcattagcaatgttttcgtttgattgcgtcatcgttgttgcaaataaggttgtgaccccttcattttgcatcatcttagttgccatttcgtcgatttggtcagcatcgccgtccattgcatcaaaaccataaccaccgtgacagtgaacgtcaataaagccaggaatgattgtcttgcctttaacgtcttgaatttcttcgccagcttgtgccttgtagtcgaacattgggcccactgccaaaattttatcatcgaaacgaatataaccgtcttcgataacgtcgtcacctgtatagattaccgcatgttttaatacttttactgccattatccatccacctctatctttaaattacctctagtataaatggtatagaccaaaaaaacaagggattccgactaaactttgaaccgttttcttgttaatttgctatactatatttatccattcatattaaggagtttaacgatgttaaaaatcggtgttattggactaggaaacattgcacaaaaagcatatttacctgtaatggcgcagatgcaagaccgggttgattgggtcttatgtacgcgccaaccggctaaattagcgcagcttcaagcgcaatatcatttagaaagtggctgcctatcatttgacacattactcgaacaaccactcgacgcagttttcattcacaccccaactgcaacccactatcaatatgttaaacaagccctgctccatggtttacacgtttttgtcgataaacccttaagtgaaaatccactggaagtcgccgaattatacaaactcgcggctagcaaagaacggctcttaacggtcggcttcaaccgccgttttgccccatttttgcaaaaattaaatcacttacccgataaacaactgatcaacatcactaaaacacgcgtggcaacgagccaaccaacgccctttgccatttatgacctgatgattcataccattgatacggcgcttttcttggctgattcactaggtaccaattacaaaatccgtccatactgtcagcaggatgcaaacggcaatttacaactcgcgcaattaaccattgaaacaccgcgccaattaatcagcgcgactttaaatatgcaaagtggtaccaatcaagaaattgcaagtctccagacaccacacgggttattcactgtcgataatctaacgcgctacacaacacaagcggcagaagacagtcgtattcaaactgcagctgactggacgcctacgcttgaaacgcggggctttgcgccaatgattgatgcgtttattactgcccttgaaactaacggcgcaaatcctatcccactagaaagtagcttactcacccaccaactctgtcatgagatggtccactttacaaaataatataaaaaagcgtaacccaatacagtatttgtatcaggttacgctttttacatgcttgagagcactctatttttggctttctaaatccttcgcaattgttgcgtcgatgcctttaaccaccgctgtcattaagccggcttcttccattgctaacaagccagcaacggttgtaccacctggtgatgaaacttgatccactaagtcccaaggtgaatcatcactcataagcacgttttgggcactccctaaaacggcttgagctgcaatttcggttgcggctttctttgttaaaccgtgtttaacgccggcccgcgccattgaatcaatgaataggtaaacaaatgctggtgaactaccggcaagcgcactgaaagttgtgaaatctttttcgccgatttcaaccacgccccccagttgtgcaaggacatccttcacccgacccaattgctctgcattgacttgttcgttaccaacaacagctgttatccctgcgcgattggccacgttaacatttggcatgatgcgtagaattggtaaatctgcagcagattgttctgctaatttatcaagtgataaacctgctgccattgaaaccatcaatggttgatgtgctttaaaggctgcatttgtttctgctaaaacctgtggcacaatatatggttttaccgctaaaaaaacgatgtcggcttgttcaaccactgaattgttatccgcaacagctgtaatccgttgttcagctacaaaatccgcatagttcgccggatgtccgccatgcactaaaatatccgttgttgcgacttgattagctttcactaagcctttaatcattgcttgtgccatgttaccgacaccaataaatccaattttcattctgccacccctttttttatttatccaaggataccgaacgagcggaggaaagtcaatccaggacacaaaaaaagacatcttagcaagatgtctttaaagtattgggctagctggattcgaaccagcgcatgacaggatcaaaacctgttgccttaccgcttggccatagcccaatcaagtggaggagagtggattcgaaccaccgaacccgaaggagcggatttacagtccgccgcgtttagccacttcgctactcctccatacgtttcatctcatcgattcaactatattagtttacaaaattctgacagaaaaatcaaccccaaaatgcaaaaaaaatcttgattattgcataaataatcaagattttttctaatatttagttaacgccttccattaacttatgaattggtttaacgaagaagattaagacgatcccgaagatggcactcacaatcccaatccctaagaaatatctaatttctgtttgtggtgaatataaacgcacaagctgtgcattaattgcttggcccgcagcatctgctaagaaccacatactcatcatttgtgattggaatgcctttggcgctaattttgttgtaattgacaacccaattggtgaaattaacatttcagcaatttcaacgatgaaccatgaaccgattaaccagaatgggctaactcggccagcggtaccgtgtaataatccaggaagtgccataaacatgtatgataaaccagcgaagattaaaccaacagcaaacttaccaggtgcagatggttgtttcttccaagcactccataaccatacaaagaatggcgttagaagcataataaatagtggattcaatgattggaaatttgatgcagctaagctatgcccaccaatgtttagaattgtccgatcttctgcaaataaggctagaacaacggagccagattcttcaattccccagaagatagcagctgcaataaagagtggaatataagctataacgcgtgaacgttccttcttagtcactttcttgctgcccaacatccgtgagaagtacacaattggtaatgcaatcgcaatgattgaaatcatcaagacgatgttatcaatgtttaagttgcctgtaaattgcatgcctaatactacggcaacgacgaccacgacaccaatcacaattttacgaataacgcttgataattcttctggcgcaattggatcattaggttttgaattttctttactgaattgagaacgaccgcggtagtattggattaaaccaaagaacatcccgacagcggctaatgagaagcctaagtgaaaatcaattttttgaccgacagccccaacaagaattggagcgacaaatgagcccaagttaatcccgaagacgaacatactgaaaccagcatcacggcgacgatcattttcactatacaaactaccaaccatttcagaaacgttaggttttaataacccagtccctgcaacaatcaaagcaattgaaataaataaagctgtcgcacccatcggcattgctaaggcaatatggcctaacataatcaagacaccaccgatgaagacggttttgaagctcccccagatccgatcacttaaccaaccaccaacaacgctggctaggtaaaccatcgaaccatagattgccatcacagacattgcagtcgtcttgtcaaagccaagaccacccttatctaaagcaaaatacatatagaataatagaattgcacgcatcccgtagtagctaaaccgttcccacatttcagtgaagaacagtgttgatagcccatgcggttgcccaaagaatgttttttcttgtttctcttccattgtaataccccactttaaaactttattattacggaaactaagaattcgatagttattaaattgaatcgactcatctatacaagaagtctcttatcattcgcttagaatctataagggctattataatcttattttaatcttaaatcaattcttttttcaacattaactgcattgtttgcactgattttttcattaaaataagttattttatgattcaaaatgactaatgcttattcttaaatgagaaaatgctcatgatacctaacatgttcttagaaaactggtttgttgcctttaaacagtagtacaatgaactaatagaaagcgagctgattccgatgaacccttttacactaacatctcttattccattacgacctgatcgttggctaacttactacgaagcaatgtatcaaaatgaacacggcgatttaatgccttatcattttgtcagtcgtgactctaacttaaccatcgagactttaaaacgaccagctaatgcctcagcggttgcaatgttctgctacaatcaaaatcactcacaggtcttactgactaaacaatttagacagccccttaatgattttgtctatggtaatcccgccggtttagttgaaccaactgagtcgattaaacaagccatttcccgtgagttaatggcggaaacaggttactctcttattgaggttgaacattgctttgcgccaagttattcctcaccaggccttactgatggcgccgttagtctagcaatctgtactcttgatcaagctaaacaaacagaccgtacacttgaagtggatgaagccttaagtaccctgtgggttaatcgtgctgaagcacagacgatcttagccaatgaaaaaatgactggacgcactcagattctattatggcaatgggcaaatgaacaataagtaatagccagttacgattttcgtaactggctattttagtggttgcttttcaatcaaattgaatattaaaaaagcattatactaacaaaacgtcagtacaatgctgattatcccgattagcacttggtagaaacatgctattgatgccggctgcaggagtcgaacctgtgaccctcggtttacgataccgatgctctaccaactgagctaagccggcattattgatgacccgtacgggatttgaacccatgataccgccgtgaaagggcggtgtcttaaccacttgaccaacgggccgaaataaaaaacgattgaaaattctcaaccgttcaagaaaatgttacgtaaaaaaattcaagccttatacgctaaaaagatgctgaaccaaattatcaaagaggtcaatgtcaaaccgctcgtttatgaaattgtcgatgcaagtgggactgaaaccgcggttttgctaagtcatgagcaatgggtcaaaatccaagccgcgttaaccgctaacaagtagcgtgaattcccgatttagacttaatacggtaactaagctgtaacatttctgtaatagttgaatgttacacttgttcttagttggaaaaccgtacataagttaagtatttttaaaaatgataaaggggaatcattcagtgaaaaaagtcagtcgattaatgttcagtgcactagcattcttaacaattgggtcaacaatggcggttagcattggtgcagtcagtgccgatgaagttgctgatacaaaagcatcaatgacaaaccttagtgctgaaaactcggctttattagctaagttaagtgctgcacaaaataaggttgcttcaatcgatagccaagtgtcaaataagaccgttgcaattgatgatgcacaaaagaacattgcatcaacggacaaagaaattactgaagtggctcaaaaaatcgttaaagttcaagctgaagtccaatctagaaaagctgttttaaaagaacaagtaattgcgcttcaaaaacgtgctggggatagtgtttctggaaatgtttacgttgacttcatcgtcaatagtgatagtttctcagatatggtcagtcgtgcttcagttgttggcaagttaaaccaagctaacaaggaagcaatggacgccgtagcgaactcagaaagtaaattagctactttaaaacaagaacaagtgactaaaaaagcaaacttagttaacacaaaagcacagttagaaaaagatcaagcacagttaacatcacttaaagcagatgcagaaaatgaacaagcaagtttccaacaagaagtggatggacataagacacagcttgctagcttacaaagtcaattagatgctcaaacagcagccgctgttgaagctgctaaaaaagaaactgaaaaagcaacaatcgcaccaacggttgcacctaaaacaggttcagacaatacaccagcaccaacgcctgcaaaaacaacgacagttgcgccatctggtgcaaacactggttcattagttggcaatgccttacaattcattggcacaccgtatgcatggggtggcgcacaacctggtggttttgattgttctggtttagtttggtacgctgctaagatggccggcattagcttaccacggacatcacaagaacaaagcacggttgggacaaaagtgtcattatcagaattacaacctggtgaccttgttttctggggtggcgttggttcagcacatcacgttgggatctatatcggtggtggctcatacgttcacgcaccaacagaaggccaaaatgtaacaacgatgtcaatgcaatattacaaacctgactttggtcgtcgtttataagattaaataaaagaataaaaaagtttggcgtctgcttaaattaagccgccaaacttttttatttatttaaatcctgaatagaagagtgtgaatgaatagtgacaaaacaactattagtcattacgggcgccacgggtagtggcaaaacaacggtgagccattatttaaaagaggcctttcaaattccacaagtggttacccataccacgcggcctagacggcataatgaagtcgacggggtggattattattttgaaacaccagacaccttggcacaaaagcacctcgttgaatcggtgagctattctggctatcaatatggctcttcacatgaagcgttagatttggcgtggcaaaaagcacagctgattagcctagttgttgataccaaaggggcacagacttatttagagacgttccccgaagaagcatcggtcttgttcttaacggtttctgaaacagatgcgttgattacgcgccttgaaaaacggaaggatagtcctgaagcaattcaaaaacggattcaaagtgctgaatttaagcgggatctgatgttaccgagtcatttaaatcaacgggcaactgtgttggttaacgatgactgggaaacaactaagcaagccttagcaacattaatcgcaaccctaaaaaattgatcattgaaaataaaaaggaagcctgtcgaacgcgttcgacaggcttccttttaacgtatggttaacccttatgcaaatgagtgttggttaaccgaattggttcgtttcactttataactgagtttttgtacggcttgttcaattgtaataccacttgcgctgattttttcattgttcgttgcagttgcgataaatttttgagtttgcgtatcaagtgaaacatgataccaattattagtttgactagtaaattccatcgtaaaatctcccttcaaatgactataaatactgatagaaggctaatgaagacgatttcttaaaaatcatctgaattacatcataacgcgcagcctgagataatgcaactattttgtattcggatttattaaaatttggtgaaatttagttgtgcttagctaacggttatgggattaagggtataatggtaaatagtgtggggtaacaactaaattgaagttggtagtaacaagcgccagcgcctgacaacctagaaagcatgtgctagaatggcgtatcgattaatcgagaggagcggatgtattaaatgagcgaaataaccactgccattgccgtattacgcgcaaatgggtacaaaattaccaagcaacgccgagagatgctacagtatttatcgggatatgaaaatcgctacattcccgtgactcaaatcgacgagcatatgcgcgccatttttccgggaatgagtcacaatacgatttatcgcaacattaaagattttgaacaacttggcttagtagaacaacaaacagagggtgaacaggcccacgttaaatatcaatgcgattttgaacatcgccaccatcatcactttatttgccgccagtgtggcaaagtgattgaattgaaaatgtgtccgttagatttttttagtcagcaaattccaaattgtcaaattgaaggtcatcagttcgaactctatggcctctgtgaagactgccaagcataatagaaagggagcgttaaaatggcatatcacacaccacccattattccaccagccgccattatttcgttaattatcgcaatgagtgcgaccaacattgtggcaaatacggttaaacctgttgaaaacaccaagacagagcagtcgtcatttgtttcaagtagtagtgcaaccacaggttcaaccagcagcatgaatacatcagaaccagaatctgagtctgaatcggaatcctcatcgacctctgaatcaaccgttaattcctcttctaaggctgtttcaagtcaggatcggacggatacggatgccaactcacaatcatctgatgatgagcagacaacaacaccacaaaatgatgagtcagctaacacgaccacggcaagcagtagctctgctaacacaagtagtagcgctaaagtggtttcaagtagtagcagtgccactgctacgcagtaataatttgttttacgcgcaataagggggacatttatcgtgttaacttttttagacattattaaccattatttcggttacttaaatattaatggtcgcgttaaaaatcgccttttttcagttatttgtttaattggtgatttttatcttctatataagagtgtgacctactttaaagctcaagcggttggacgaggtgtgattaacctcctcgtctttttggtgttattctattttgcagtgatgaacctgtatttctattatcggggcaaaaatgcggtcatcgatatttcaccgtatgttgaaaaagcgctgggtggtgatccaaacgcgccacatccactaaatggggtaaccgccaaaacgcaagtgatctcacaaattcaaccggccactggcttatttgaagaacaaaatctcttgcccgcgcaactgacaatggacgcggaacaaacccaacgtttaggatccttgattaacgaactgattgaatctggctatcttagcttgaattacgcaggcttaagtgataatgatatatatgaacaagcgcaacaattgcagcgaccaatttatgcgattgggaatcaagttgctttaccgttttatgaaatgaaacaagaagcagatcgttgggtgctctatggggggattaacgccattgccaaacaaccgttagcgcagattacgacggttggcttaaccccaatccaagacctagcccaagattatcaacttgcagtcgcccatacttggattacgggtggcccgaacaagatggccgggcgtagtggcgtgcttgaaggcaatgatccctatcaattagtggttcagattgcgtaccaagaacgaacaaagtagtcagtggaggaaaataggtggagattcataacgaattcttagatgtcaattattgttaccaatactacctactagaattagcggataacggcaattattacttaacagggtagattgtaaaatttttaatttatctttcgccggatttttaaactattccccgatttaaaattgaagtgcaacacttgataactagaccaattagactagcttaaaaggccatgaaggcctattcttattattaacgacaaaatcaacagataaggataggtgtcttcatgacccaaactaagaatatcatgcctaagcattaccaacaactccaatcttttgaacgcggtcaaattgagtccctgactcgattaggatttggcgttcgtcagattgccagccggcttcaccggagtcccagcaccatttctcgcgaattaaaacgcgggttaaccacccagattgattcccagaaacatcggtcatatcagggctactttgccgagcgcggggcggcttactatcgagaacagcgggccaagtgtcaccccaaaggtttactgcagcgggctgccgtgttcttcaagtccctgccgaaagctttaaaagctaagccacgagttttcagtgtcgacacgtatgtccactatttcaaagctcattacccgggctttccctgcccatcaacggctacggtctatcggtatatcgaggctggcaagctcccggagcttcacaactatgatttacccatgaagctacgtcgccgcgttaaacgcccgaatcaccgacatgcccgcctgaataaaaaacggcttggacagtccattgaagaccggcccgcagtggttcggaaacgtcaggagttgggccattgggaaggcgacttagtgaaagccaaacgggttgagtccgaaccagctttaatgacgttaaccgagcgagttagccggatggaaattatcgttaaattgcctgattaccgggcagagacttgccggcaagccctccaagatacgattgatgattacggtgcagaaaactttcggactatcacgtttgacaacggttcggaattcgctagtttaaatcaggttcaaggaacggaaatctactttgcccatccatattctccctgggaacggggcactaatgagaatgtgaatggtcaattaagagagttcttcccaaaggggtattcctttaaaaacctctcattagtggatctgcagttggttcaagacacgctgaatcaccgtccccgccgctgtttaagctatagttgtccagcggatgttatgccacaactggtttaactttctagaccaattataagaataggccattagtgttgcacttaacttgacaattgaggtttttaaactatttaaaatatacgcattttattcatccacaaatgttatagaattaaggcaatcaagtaagtgttttaatcctaataaaaatagtgggtacaataaaatgacgatttattatttaaaaccagaaaaaacagtcgataaaattatcaatacattgcacgctagtgttgctagcatgcaatattttgaaacgctagatatgatttgcgaaaaagttgagtttaatcttgatgaagccgcgctattacaacgaattaagcaactagccgatgattaacgcgcagatttggaaacccttcattcaatcggggtttcagaaaatgatatcgaccgtttaaaagctgcaggtttattattattcgttcaggataatgagattccacaaagctatgtgacgctcagtcggaaagcattagttggtttgcaagagattgcagtggcttatgctcaagagtctacacagctaacaatgaatattgattcaaaagaaattcaaagcttaaaagcagcttcagataagtttttcagaaagtatcaataagaaattgaaaaaagcccatcgacatttatgtcgatgggcttttttgtttgccgcaaagtagcgcttggctatgcttgaacgaactttttaacgggtcctaataggtctgggttgatttgtgcacgaatcaacgtgccatcttcttcatagctttgtttagtgatattggcacgatcactgaggtacgaaacagcttgcccttctgtgtatgggactaagaagtcgagcgttgggtattgttcaaagagttgtttgttaattaaggcaatcaatgcatcgattgctacttcgtcgcgagctgaataaacgatttggtttccgtctacttcaggatagcgcgtatctggtttcaaatcagctttattgtaagcctcgatgactgggatatctttaatgttgagtgattcaagggtttcttgtgtcgtttccatcatgtccaagtagtttggatctgagtaatcaaccacgtggattaaaagatcagcactcgctgcttcagctaaggttgatttaaaggcttgaattaagtgatgaggaagttttgtgacgaaaccaaccgtatcactcaacaggaatttctgttggttggggaggacgatttcgcggacactcgtgtctaaggtggcaaagagcatatccttttcaaaaacttgtttttcaggtgtatcggggttcaaccgttgtaaaattcgattcatagtcgttgatttacctgcattggtgtacccgacgagtgcgacaactggaatcgcatttttcgtccgttgacggcgttgtacgagttgttgttgatcgattttagcaagttcggctttgagcttcgtaatccgtttttcgatgagtcggcgatccaattcaagttgggtttcacccgccccacggttcgcagtacccccgccaccttgttgatccaacttgttttcagaaggatggaggcgtggtaattggtatttcgcttcggcgatggccacttggagttgcgcttcttttgttttggcacggctagcaaagatttcaagaattaattgcgtccgatcaagaatgcttattccgagttctttttctaaattccgaatctgtgaaggtgaaagttcatcgttaatcaagataatgtccgcatcttcagcgacggcgcgttctttaatttcttgaaccttccctttaccaaaataagtggcgtgattagcttggtcgatattttggcgaacgtcaccaacgacttctaagttatcggcacgggctagttcgcccagttcgcgcattgtatagtcaaaattaacttggcgttgactaacaccagtgattaaaacctttttaggttgcatataagtttcttccatgagatctcctttttgtgagagtgcgtcttcaaatggtcagccgttgaggattagcaatatctcgtaaatgagcggcaacgccgattgtttacgagatggcgctaaacgcagacggctatttgaagaaagcacgtttaagataagagtgcggcaccggcggttatctgctgaggattagcataggcagacgaaaaaccgatttgttggttatttggctgacgtagctaaccgagagcagatgcctggtggagcacgtttcaattgaaaaaaaggccatggcaaaaatattcttttgtcacagccctcagttaattaaatttaaaaagcgaatgccaacagaaatagccgcaaaatggccacatgattattcaattgtgattgcgattaaacaaacgttagttgacatgttgttgacgctcctttgatgtgaaatgggtggttacccaccttatccgttaagtgtaccatgaaagccattaaaaaccaaagttcgcctttagcgtgtacgccaataattaacactgttgtgggtgcccagcgtaattttatggtagaatgtaagcggttatcaaaatacataagagaatcgattgggggattgacgaatgaaaaatttagcattacttgatgttggtggcactacgattaaatatggtttatgggatggtgcggcgcaacaattgaccaaacaaggggctgttgccacaccaaagtcgttgaatgcgtattatgatgtgctgacgcagattgtggcggagtttaaggctagtgaccaagttgttggggtcgcaatgagtacgccgggtgcagtgaacaaggcgacgggtattattgaaggggccagtgcgctcccttatattcatcattttgaaattcaagatgaacttgaaacgcgctttgacttaccagtcgtaatggaaaatgatgcgaattgcgcggctttagccgaagtcggtagtggggctgctaaagggctaaaaaatgtgttgttcatggtaattggcactggcgttggtggttcagtgattgtcaacggacaagtccaacatggtcgccatttattcggtggtgagtttggctacatgatgatgaatgatggtcggattttaagtgaagtcgggaccgccgttcacatggctgaccgttataatcaagaggcacatactaactactcagggcgtgaagtttttgaattggctgatcaaggcgatttactcgcgcaaaaggaggcacaggtgctctatgataatctcgcacaagccatctataatttacaatatagttttgattcagaagcggttattttaggtggtggggtgtcgcaggccgatttcttggtgccaaatattgaaaaagctttacaggaaatactcaagcaagtcgatattgcgcctttcatgccaaccattcggacgtgtcagtatcataatgatgcgaacttgattggtgcaatggaagatttccgccgcacatatccgaatttagttgcaaattagactagtaaagaccgctttcaacatgtcataataaatattataaatgatattaggaggcggttaagatgcccacggaaaaacaagcattaaatcaaacgattggatttaccgcggcattagccactgtgatgggaacggtcatcggcgctggtgtgttctttaaagcggatcctgtgacgcatgcgaccggctccaccgggctgacaatgcttgcatggcttgtcggcggcttaatcacaatttgtgctggattgacagctgctgaattagcagctgcgattccagaaactggcgggatgatgcggtacatcgaccatacttatggtagtttagcggcatttttattaggttgggccgaaacaacagtctactttccagcgaacattgcggcgttgtcgattgtttttgcaacgcaatgcattaacttattcagttggtcagctcactggcagattccaattgcaatcatcgtcggactcagcttaacaatcttgaatttctttggttcccgggttgggggactattccaatccttcacaaccgtctttaaattaatcccgcttgcgattattattgtgttcgggttaattcatccaggcagcaacgccgttcatgtgtcattatttgacgtgacccggtcaaatggatcggggagtttcctgtcagcgctgggcagtggtgttctagcaaccctctttgcgtatgatggctggattcacgttgggaatattgcgggtgaattgaagcatccggaacgcgatttgccgcggtcaattttaattggtttaacaggaaccatggttgtctacctcttagtgagcgccgtcttcgttcttgtgttgccaatcaatcagattgccggcaatccgaatgcggcttcagaagtggctcgagtgctatttggtggtgtgggtggtaaaatcatcactatggggattttaatttccgtctatggcgggattaacggctacacgatgactgggatgcggattccttatgcgatggcgctcgagaatcggttaccattcagtcgacaactgcgctccctttctaaaacaggcgcgccggttgtcagtggtttagttcaaattagtatcgccatcgttatgatgtttatgggtggcttcaatacattgactgatatgttggttgttgtcatctggattttctatattctaacgtttatcgctgtgttcattctgcgcaaacgtgaaccagaattaaaccgtccgtatcgcacacttggttatccagtgattccagtcatcgccattcttggtgggattttcatcgtggtgaatacattattcacacagacgatgttaactttaatcggaatcggaattacattactcggattgcccttttattactatttaaaaaataaatatccagtcgtttaacacaaaaaacgaagttcgtgaattaactgaacttcgttttttttgtggtcaaaaaccaattgtagcaacggatagacgaaaaataaaatagttgcgcaaatgaattatcggcattaattgttgatttttggtagattgtaaaattaatccgaacgctgttcggacaaaaaagatcagcttcctttaaaatggtgtttaccacaaacccatcttttaggagctgatcttttatctagtataacctattccgaggccgaaaggtttaaccttttttgttaccatcagttttttccaagagagagtagtgattaacctgcagctattagctaatgagatacttagtgttactcaggatgtttacgtggcctatgaagaaccctactagctgtgagtaggattaagctaagtaaaatataatatagcgcatcgtaattaaaaagccgtttaacagtcccttatgggatggttaaacggctttttgctatgctaaggcgtcattttctgtttcctgataacgttgcaagatgtagattgctaggataactagaattgcaccactcatttctacccaactaaagcgggcatggaagaagatgatacttagaataaatgtaattacaggttgtacggcatcaacgatactgattacggttgatggtgcaaagtttaaactgtgtaacaagcaaagatatgcgaatacagttccaatcaaaataacggctaaaattgcgataataccggaagcatttaaacgcggcggtgcttgccagaatggtcggtggatattgaagagtaaaccactgatgaacatgccccaacctaaaacgagaattggtgatttttcattaacgattggtcttggtagcacaacgtagaaagcagctgttacaccggataagattccccagattaatgaattaaaaggaattgttaaagtatggatattgcctttcgtaatagaaaggaaaacgccaattaaagcaattccgaatgagataatatcaattcgatttggccacttacgtaagaaagcgagggttccaataacgataaacagaggacttagatattgtaaaatagtcgccgctgctgcattccccgtttggatactcatgaagaaagtatattgattacccatgataccgaaaagggcgtaagcgattagccaagccgttaatcgttttgatttaaaaatggagaagatatcttgtttgaacttaattgccccgataagtaataaaattaaaccagcgccaagcgttctaacggataggaaccaagttgcagggatcttttgtccttgcgagatgaattccaaaatagtacctgaaacgccccagagtgcggacgccatagtcgcccaaaacatgcctttggcgatgttttgcggttgagttcgattgttcattgtgcgccatccttttttgaaaatttataactatactattataagctaaatggcgtatttatgctatttgcaaaacttttttcattattattccccacaaaataataaatatggcagtgataaagcgaactggtcaacaaaagctaattaagttatgatgaataaaaaagtgagggattcagatgcaatacattgcgttattacggggaattaatgtgggtggtaaacggccagttaaaatgagcgtgcttaaaactgcgtatgaagcggctgggttcaccaatgtgcaaacatacatcaatagtggcaacgtgttatttgaagccccagaaacaggcttaacaaccttagcggcaacttgtgatcagattatggtggagacctttggcttttctgtgaatatcgccgtggtcacagctgaccagttgattcaagctgttgcggacgcaccaacttggtggggcaatatgccagatgtgaaacataatttaatcgtggcgattgcgcctaaaacgggggcggaattgagtgtacatgtaggggcaattaagccagcgtatgaaaaagttgccgtgaatggtccgtttattttctggagtgcacccgtgaaaacattcggtcggacgcggtggtcgactgttgctaaaggggacctataccagtggctgacaattcggaatgccaacaccgctcgtaaattagtggcactcgcacaggcactacgggaagcatgaagtggttagactcgcatcttcattaatattcatatatacttatagtaataatcaataaagaaatgagggacgcgatgcgcttatccaatttgaaacagacgattatccagatggggttgatcttgattgctctcgaaattattgcgattgggattcaactcttctttgccccccatgaagtagcagccggtggggcaaccggtgtggggatcttattagaagaattgatggggtggaagatatcaacagtggtgtttgtgattaacatcggcatgctgatacttgcttacttcttacttgataagaaaaccacgttaagaattctctttggtagttttatgctaccagtttgtttagctttaacgccccaaatgatggtggtggaagacaaactattagcaattattatcgggagtgttgtttacgctgccggaattgccttgttatatcgaattgatgcctcgagtggtggctcaacagtgccaccgttaattttcaaaaaatatttcaatatcaaaccggcattgagtttgctggtagttgatttactagtctgctttgcgaatgtgttcgtctctggttttgagacgttcatgctggcaacttgttcatcaattctgacgttgattacgatgaactatattgagaccgggttgaaccggaaaaaggtcctctatgtcatgagtaacgaccaattacctgaaattaaagcccatttaatcgaagaatctgatgtgggcgtgacgatttttgatgttactgggggctattctaatgacaataagcagatgttgatgctcgttgttgaaaatcaagcctatcaacacattattaatcgaattcatgaagttgatcctttggcatttacgattgtggctaacgtagccgaggtacgcggcggtagtttataaatttaaaaagggtcgagacaattgtctcgacccttttgtgtgttattgatgattaaagtagcgatcagcttttaaattattgatggtgagcatgataatcaagctgatgatatagagtgttgaaatgaagagcatcacggtcatcaccgaataatgatcaagtaaccaaccgataatcacgctcgaaaatccaccgatacagcggccaacgttcataatcacgttattggcggttgcacggacttcggatgggtagaggcgactgacaatcgcgccatagcctgcaaacataccatttgagaagtagccgacaattgcaccgacgaacaataaagcacccatgctattggggaaggttaagatgtaaacgcctgctgctgaagcaatcaggaataagacaaaagcaaaccgtggaccaattcggtctagaatccaaccgaaagtcaacatgcctgctgacatcccggcaatcgtcgctaacatccaagttgatgaaccagccacactgaggtgcatttgttgttgcatgatggttggtaaccagttcattaaaccgaagtaaccagcgatttggacgattgccattatcatcagcgcaactgtttggtaagctagttcgcgtgttttaaaaagagcgctaatctgaccttttggttgatctgattcagaagtgaacgttgtactttcgactagatgatggcggataaaaaaagtaatgataacaggtaataggccgaatagaaatagtgcatgccaaccaaattgtggtaagacccacgctgctagaagtgccgcggcaatagcgccaagttgacctgcgacacccacgaaggatgaaacacgtccgagctgtttcttagggaaagattcggctaagaccgtcatgccaatcccatattcgccaccagcaccgatcccagctaagaagcgacagagataaatcatgggaagggtgtgggcaaatgacatagccgctgtcgcaaaagcaaagataaaaatggtgtaagtgaatgttttaatccgtccaacgcggtcggctaaaacgccaaaaaaaacgccacctaacaacattccaatattggtaatcgttgcgattaatcccgcctgtgttccactgagatgtaaatctgcaatgatggacgatagggtgaaagacaagaacataacgtccatgttttcgagaccgaagccggccgttgttgaggcgaccaccttagtctggtagcttgttaatcgatgttggctgtgtgccgtaatagttttcatattcagttttcctccaaaaaggacgctctctgtcgtcccttattttgcttggtgccaatcttagcacaggaaagtagtctgtgcaagggtgttatggaaaaagcgcaagcgtcctttgtgatataattgagtttataaaatggctcttcagcgatggagggcgtcatggaggctattgaatgactgataagaaaaaacactttacttttccgagcgcctacacagtaattctacttgttttactggcagtgatgatcttgacgtactttatgccagccggaaaatatgcgagtttacaatataacacgacccaggaaaacttcactgtggtcgcacccaatgggcatgaatcgacagcacctgggacacaagcaacactgaagaaataccacgttaatacggatttagcgaagtttaaggatgggtcggtgtataaaccagttgcgattccaaatacatatcaaaaactcaatcagcataaaccaaacttatttggcgcgattaaacaatttctgaatgcgcccattcaagggttatctgaaacaatcgatattatcacatttgtcttaattctaggtgggattgtgggcgttgtgaataagaccggtgcatttgcggccggaatggcggcgctatcgaaacgtttgaaaggtaaagaagcctggttaatcgtgattgtaacgagcttgattgccctaggcgggaccacctttggcttggctgaagaaacaattgctttctatccaattctagtgccaatctttatggcagctggctacgatgcgctagtcgcaattgcggcgatttatctaggcagttcaatcgggacaatggcttcaacggtgaacccattttccgtcgtgattgcttctaatacggctggcattagctttacagatggtatgggactaaggcttgtaatgctgattctaggcacattaatctgtattttctacacgattcggtatgctgaaaaagtaaaacaggatccaagccaatcgctcatttataatcaaaaagcagaattggaaaaacatttccttggaaatagtgatgtcaatgaagtaccacggtttgatttccggaagaaattgatgttaattatttttgcggccggttttgtcatcatggtcttcggcgtgaaggaatggggttggctatttaatgaaatttcctcgttattcttagcgattacgtttattttggcgtttatttccggattatcggaaaaagattttgttagtgaattcgttgcaggggcttccgacctgttaggtgtagcccttgtgattgctttagcacgcggcgtgacgattattatggaacaggcacaaattagtgatacgctattgtactggttaagtagtggcgtttcccatatgagtggtgttatcttctcaacggtgatgttcttcgttttcattctactaggattcttcattccgtcgagttccggtctagcggtgctatcaatgcccgtcatggcaccgttggctgatgtagtcggtgttaatcgtgacgttattattagtgcttataactggggacaaggcattatgtcgtttatcacgccaactggtttggtcttggcctcgctggcaatggtccatgtaacgtttgataagtggttaaaattcgtttggccattaatggcgattattggtctattagcaattattttactcggtgttagtgtctatctttaaaaaacggtcaaaaaaggtccgccacaatcgtggtggaccttttttcgtgattagtaaactttaaatttcgttactggccagtagcggagtttgacaacgccttgaatcccgttgaaggttttagaatcatcactgacaaagcctacttcttcataccggctatcctttgaaacagtccggttatcacccatgacgaagtagtggtgggcagggactgtggaacgaccaagcacgtcctttaaatcaaagtttggcttattagtctttgggttgagtgtgaagtagtttgacccggctaggaaggttgttggatcttttttatagtcatttaaataaggctcactgacttttttattattaatatagagttgatccttgttgaagcgaacagtttcaccgggcatgccgacaattcgtttaatgtagaattcacctggtgaatcaggggccttgacgataacgacgtcgccgcgtttcagtttcgtatggcgtagtgcaatgacccgatcatactgtgtaaagttgggttgcattgatggcccgaaaatttgttcattggcaatgacgaatttaagcagtaattgcgcaatgccgaccatcacggccgctaataaaatgatttgtatagtggatttccaaaattcttttgctttagctgacatatcgcacatccttagaattcaatagattcattgtactacaattaattggtagatgacaacaaaactgtacagttccttaactatttaaacgatcttttaaattaggggaacgccgcgttatttatcacgggaaacggttcgtggtatactgaaagggattattttaaacgacaggaaaagtgagtttaacgcatggcgaatttagtaattgtacgacatggcgagagtttagccaatcaattaaatacttatactggttggtctgatgtgccattaacggctgctgggcgcaaacaagcacagcatgtgggccgacaaattcaagcaaccggaattcaattcagtcatgtgcatacttcgttattgaagcgtgcaattttgacgagttacattattctggatgaaatagaccaattggccattccaatgacgaagagttggcgattaaatgagcgccattatggggcattgcgcgggttaaataaggaaaagacgcgggctatttttggtgcgcatcaagttgcccgctggcggcgtagttacacggcggtcccacctttattgacgactttttcgcaggcccgtcgttatcgactagttccaccgatgagtcggccacgcggggagagtcttgcacaggcaacgcaacggctattaccttattggcaagatcaagtagtgccaggattacttgcaggccaggaccaattgattgtagcgcatggttctactttgcgtgcgctcattaaggtgatcgaacagatttcagatcgcgatattgatggtgtggaagttgaaaatggtgaagcactgtattatcgattcgatgctcaaatggtagtcattgagaagggacgattagcggactaagcggatggacaacaaattgaaaagaggactgctgttggtagggctcatcctactaattattggcggcacgatttatcatgaacggcaaaaatatgccgtccaaactcaacaaacccaacaaaaaatgaaacaacttcagcaacaattacaggcaacaaaacttgagttagccattcaaaaggcaaaaagtcatgaagccgggattgatgatcgaaccatcaatcatttgagtgcgaaggaacaacaatttgtacagcagttgctacatgataacagttttagcgggaccattttaattgtgcggcggaatcatgtgttatttcaaggtggccggggctatgcaaattttgcgactaagcaactgaattctccacagacgacgtatcagattgcatcgattcaaaagtcattaacggctgcgttattgatgaaacaggtgcaagccgggaacatcgatttagcgacaccgttaagtcggtattacccgcagattaaagaggcggatcaaattacgctgaagatgatggttgatatgcgttctggactgactgaattatctgcaccagaaaaagaattatcagatcaagcgcggattcaatatgcgcttgatcatttggctgttaaagatattggtcagcataattattcgccagttaattaccttcttttggccgggattttagaacaagtcacccataagagttatcgagagttagttggaaatcagttgataataccgtttaaattaacatcgtttaattttatgccaaatgaaacgaccggccaacaagcgactgcttatggttatcaacaagacggctatggcacgccagttagtgaaccaagttacgtatatatgcgtgagttagggaccggaaatatgtatgccacaacgagtagcctctttcgaactgaacaggcgattgttcaaggaaaagtttttaaaaaatcgttattaaaaacgctccgctcatcgactactggtgaatatacgggtggtgtttataattacaaagattattttacaagccatggggtcgaatctggattcgaatctagcttgcagatgagtcaggatgggcgttcaggaattgtcttattatcgaatcaatataaggccaatccttcaatcggacttctaacgaatcaactttataagcagttaattacgctcaatcgttaaaaaagcagcttggcttaatgcctagctgctttttgtttggactgtaaaatgatgttgtgcaagtgtccaaaggccaaacccaattaaacagccaaaccagtttaagaggatatcactgagtgcgaaagtccctagataaaaggcgaattggagaatctcaatgcctagaatcgttaagagcgctatgatgttcgtttcaacaaatgaggctttcaaatggtacaaaccgcctaatgggatgaagtaaacgacattcagtgcggcttcgagcagtgttttgtgatccttttgaatgaaatcgaacgggttcaagctaactgcatgatagacgtttgctttagtgaataagacaatgaataataagagcagatagacgctgtagacgagataaccatagattggcgatagttgtcggcggtcccattgcacccagcccaaccaaaatgtaagggttaaaaatagaatcagaaaaagcgtcgttgctggaaaacgggccataacccgggttaagcgtggataactgttgagtgttggtaagacaatgtgccacacgaagtagcgacttatgaggtaggcgaccacaccggctaaaccatattcaagtatcttgcgcattacgattcctccagtgattatagtttggtttgggcgaggcgtttagtgaattcagccataaagtcaaaatgttgtgtgtcggctaacgtatcttctaatttatttagaagttcgttgagcgcttgttgttcgtcgggggttaggctaccgaataaagtctccgtaaattcattgcgaccatcgagggcttcttttaaaaccgctcgaccggccgctgtaatgaagacgtgggtgattcgccgatcatgatgatcgggccgccgattaatgtagtgtttagactctaatttgtgcaagcattcggttagggatgaaggccgaatatcgagactttcggcgagggctccctgcatttgtccgttttcgatattaaggcgttttagaatgcgaatttggctgactgagcgatgatcggatgaaaattgcatgccataataatggcgataatggtgaatcaccttattgaaagtttggaaaagctcgttagatagctcggtcatggggactccttaataaagtttaatttgagatgctaatacgggtataatacgtcatttcataaggtggagcaatattgctcaggttttatcaagattgttgtgaataattttacataataaccgcaaaaaaaacgatggttaaactgagtcagttctaaccatcgttttggggttgttattgagctgcctttaagaaatttaatgcagctgcataatctggttcgtctgtttgttcgataattaattcggtgtagctaattgtaccatctgcttccaaaataaagattgagcgttgaagcgtgttgttgcttggaacgtagagttgcattgctttcccgaaactgagtgcctcatcagaaaggagttgcatgttcttaacgccttctgcagcgcaccagttattttgttgttcgatggtgtttgttgaaattgtgtagaaatggacgtcttcgaattgatcgacggcttggttaaaatgctttgtttgaatgctgcaaacacgggtgtcaatgtctggcacgacgctaattaaagtccgtttaccgagcaattgcgcagaagtcaccgtttcgccagcggcatttttaaggtcaaattggggtaactgtgtgccgacggctggtggtgtgccgattgtatcgagtggttgatcatgtcttgtgatttgcatttgcataaacctcatttcataataaaagatgcttttattctaagctgattgtgctgagaacacaattaatcacgctcgaggagtatagaaaatattttaaaggaagctgatcttttttgtccgaacagcgttcggacaaaaaagatctggattgaagtcaatatttgagacaggttttaagagacattcagaaccgcgtttaccttccacagctcaaataaatcattaatcggatagttaaaaaacagcccaaaaccgccagtgttgatcgcaaggaagtcctgctttcagaaatcaaagatctactcgaaaatcagcaaaaatgaaaacagccggcttgctcaaattactttcaaaccccaattaattgcgattaccggatatttgaactagaattaacttataaatgattttcacaaatggaaatacttgagaagaggttttgttatgagaacgtttgcgataagggctcgtgatggggtcatggaaatcaattattcagagaattccaataagcccccttttaggaagtttatgatcacctacaaccccaaattttcaattggcgataatcttgagaacattaaggctgccctcactggggtgccaattgatgcagcaattattgaggattcattgaactatgaattctctgacacgatcatcggtattaatcatcaaaagatcgatattggcctagcaattgccaacatgatgaatattccggtcgttaacctgcataaggttcaagatgttggtttggaaaaagcagtggcagaaaaacaggaatatttgaagtggcaccttgattattatggtgagtacagcggcaagcgtaactatgggcaagaggccatgctgacaatcggtaacggctactttggcctgcggggtgcgtatgtcgaagcgaacgccaaccaggataattaccctgggatgtacgttgctggtgtctacaatcaactcacaaccaaaattaacggtcgggatgttgtcaacgaagatctagtaaacctccccaatgctcaatacatcagttttggggtggatcatcaacaaccgtttgaaattaaaaaagaagatattcaagatatttatcgaagcctaaatttgcgaaccggtgttttaacaaccaccttgcatattcaattatcaactggccacattttgcaagttcgggctaccaaagttgccaatatgacaaattggcatcgttattccatcaagtatgaattaaaaccaatcaacttttctgggagcattcaactctattcaaaaattgacgggactgttattaatggcaatgttgagcgctatcagggtttcgatcaacaccatatcgacgtcattggcatggttgcccgcgataaccagatttcgttaaccggtcaaaccaagacgtcccacgttaactttgtgattaattctaagctttctagcaaagatatcgataccaccaagttaatttcagctgaaactgaagataaatcaatccagcaaaaattggatatccaagtagaacctgagaaatcgtatgtatttgaaaaatgtgtcacagtatttaccagccaaactcaggatgccaacttggaacaacccgcccaaaaggaactgaacgcttcttcgttcaatgacaccctcgccgacagtcaaaagttctggagcaacgtttggcagaattcagatatccaaattgataatgatatgaccagccaaaaactgacgcgggttaacatctaccatatgcttgtgacaagtgccgccttggcttctggtcaattagattcctcagtcggcgctcgtggcttacacggtgaagcttatcgaggccacatcttctgggatgtcacctttgatctaccgttttatgctattcattacccagcaatcgctaaacagtgcttgttatatcgctataatcgaatcggtgaagcgcgcaaatacgccgcctcggaagacaagcaaggggcaatgtatccttggcagtcagggatgtatggggatgaacaatctcaatttgttcacttgaacccggttagtggtgaatgggatccggataacagtcgcttgcaacgtcacgtttcactgtcagttgcctacgatgtcattaattatgttcatctaacaggtgataccgaattcatgaggaactacggattagaaatgttattgtcaatttgcaagttctgggtcagcatggcaagctacgataaaaaagatgatcgttacgatattcatcacgtcatgggaccagatgaattccacgaagaatatccaaactctgatgatcacggactcactaataatgcttataccaatatcatggtttcttggttatttgataaagtcgcagagctgatgagtcatgaagatcctaagataatcaaatctgccaatgaaaaagcccaaacagacaatagtttacttgatcaaatgagtgatattgcccacaaacttcgtctcgatatcaacgaagaaggcatcattggtcaattttccggttacttcaatctttccaagctcaactttgattcttaccggaagaaatacggtgatatatcgcgaattgatcgactgttaaagggtgaaggtaattcacctgattcctatcaagttgccaaacaagccgacactttgatggcttattacgaattaccatttgatgaagttcaaaacgtcattacccggcttggttacaagttgcccgccaactactttaccaccaatttaagattttaccttgatcgaacgactcacggatccaccctttcacgaattgtttattcagttctggatgaaatggatggcaatatggatcgatcctggcaattgttctcaaccgccttgttctccgattactatgatatccaaggtgggaccactgctgaaggtattcaccttggcgtcatgggtgctacgcttgaaattgaaaccaagtgttacggcggggttcggtttgacaccgacgaggtttccatcaacccgcaccttccaaccacttggagtaagctatcatttaagcaaacgtatcaaggcatcacgtacaattttgaaatcggtcatcataaaatcaatgtgactgccgattcgagcagtcacatcaaggttggtgacaagggttattcattatccaagaacaagccaactgttattacttacaaataagattaggagtgaaatacaatggcaaagttttcagatattaaaggttttgtcttcgatctcgacggtgtaattacggatacttcggttttccacagccaagcttggcatcaagttgctgacaaggtgggtgccccatggtccaaagaacttgaagacggattaaagggaatcagccggatggattctcttgaaatgattttaaaagcaggtaatctacaagaccactatactgacgatcagaaggttgatcttgcaacggaaaaaaatacaaactacttgaagttggttgacaaaatgactccagctaatattcttccggggattaaagaattcctggatgaaattaaagatggtggttatctgttatcattagcttctgcatcaaaaaatgctcctactgttttgaagaagctacaattgactgattattttccaaagattgtggatccaaaaactttgagcaaaggcaaaccagatccagaaatttacctcaaaggtgccgaactgatcaatttgaaaccagaacaatgcattggagtcgaagatgctgccgctggagttgaatcaattaacgccgctggggaaacctccattggaattggtgacaagacaattttgaaggatgcagatgtgaactttactgataccagtgaaatgaccttggctaacattaaaaaacagatggactaattcaatccatttggaaaactgggacaattgatgctttaatcccatcatttaagggcttcaccctgaaatccaaaacgaggatttcagggtgaagcccttaaatgattgcgtatcgtaagttatttgattaacccgtaatgcttcagcccattcacaattccgccattcacatttgaagtagtgacgaatgatgctttggctttcacatctgggtgaccattacccattgcgactgggtaatccacttcagcaaacatttgcaaatcattcagctgatctccgaaagcataggacggaatgtcccctaattgcgctttcttcaagagtgcttgaatgccggtttgcttcgatatcccccacttcatcgtatctaaacagcgaggattatttctaaccaatgacaattcacccttgaattcatcctgatacagtttatctttatcataattaaaaacgttcaagaaattgacttcatgagtcttgtaaaagtccggctcaacgtgcggcgtcaatcttaacagccgatagttaactttagttaagtcattttcagctgttaaggcaaattcttcattgttatagaatgaaatcacatcgccctgctttttggcaaatgctaaaatctcttcaatcacctcatcactaatttgctcagcctttagctttttcccttgatattgaacgtaactaccgttcgcactgactaatgaattgataccggtagcgtcaatcacatattgaatttcaaaaatatttcggccagttgaaattacagggagaatattgttctctcgtaactgattaattgctgcaatgttgtcatcagaaacattcttttgattatcaaatagtgtgccatctagatcaaaaaaaacaaccgctttatacattgaattccctccatttaactcgatatctacattgtactacttaatctactgctccctgaaaatttcgcctaacttttgacaaaaatatgtatattgtgtttccataatttgtgatacactactattatttacaacaagagtatcacgattaaaaacattccagaaagagcatatgattatgttgtaaacggtcgacccgctattgaatggattattgatcaatatcaagtgaaaacagataataagtcagggatcacagatgattctaatgatttcagcgatgatcctaagtatattttgaatcttttgcttactgttataacagtaagtatgcgaacgcttgaattgattgatgaattaccagactttgaagtccaagaatagttcagggtctataaatgtcaaatcgcccctgtgaaaacctattaaaacagcccctaacaaaccaagttgatttgttaggggctgttttttagattatacttaaaataacgcctataatggttggattctaatgcttaaaaaagaggtgactaggttatggtgcaataacttgttttaccaatcaaagattctaacgtcctaacaagtgtccaggagacgctgttggatagttttcgagctggtcggcgtaattacaccatttttcaactgggtaaagcgaccttactacgggtcagtgatgtcatgcagctgaaaaaggttgatgtctttaacgccgatggtacgattaagcaaaatacgtttatccacgaccaaaaaacgggtaaagctaacactttttatctcaaactagtgcagactgtatattaatcttttggaaatattttttcattgataacaacgactgttttttcgctaatgcccactctatattcaaataataaatctactaattcatcaccatcaactaaggtaattaaattagctccttgacgcgatctactgacagcatcatttgtataggtagaagtcgttacaaatatccctctgtctgcattatgaccactaatggtaccagcaaaattactgatatctggtcctgtaaccggaccttttgtaaatcgcttagtttgtaacacaattttatatgtcatcaactcaggggttcttaaataacctatgccatcaatgccactatctcctgtttttgaagtggtatccattttaatgcctatttttcgcataagatttacaatcaattcttcaaacttatatggattcatttcactcaatcgctgtaataattgatctcgccataattcagaatcatctgtttcttctacaatgtcttcgtccagattggcaatattgacatttgaagatgatagtatttcatctttctttttttgattatttagcttatttttttgccaaacaggagtagatattgagtatacatcgtcccatacatcaaaattatttatatcaacgtcttctcccatctgtgtcaaggcccatactccccactgtggtgaataaagtaatccggctttctttaaattagacatagaccactgcaatctaaaatctaactgactttgaccattactagactttttctctctatctgcatctgtaaaataaggatattcaacagccttttctttgacaagagcagctttagttggccccccataagactgtaatgcttgtaaaatagccactacaccaaacttctccatatagttcaagtttttattagaattcacgaagctgagccaattcttaggcatatcagcttccaattctgttattttacgagtgattccgaaatgatcatacgataaatctaccatgtttaatccatccttataaattttatttttattatacacttacgtttacagattattttaatgtggttaagctgacaccagcttgcccgacgcgggtagcgttctgcatgacatgctcccgatgaaatcgaccatgcaacggtaaattgccctgtcacggcgtgacccgccggaggttttacgagccggataataggcgctgtaaaataacagttttcccagaaggaagggaaaacgctactgtaatcgcttgtcgattacttgcctcgcagagcctgtccaaaatattattttggtataacaggctatgccagatttttaacggtgttatactggtcttggaaaacctttttcgaggaggcatttttgatggcgcatttacaaaatcgcctctcaaaaatattgaaagaataacccctaatatctataatgtagatattaggggttatttattttcatattataaaaatgacttcttctattcgtcattttttcgataccttttagaacgattttgaccaggaaataaacgatcatgcgatccgactcgaatgccaattaagactagttcatctgtatcaatcgtataaaccaccaggacatcgttagtttcgctgggtgttttgattttcggggtgtctcgtaaatgaaattcattataaccgctcattcgccgattaagctcatgatcttcaaattctggtggtaattgttgctgctcaagcaacaggtcaatggctgctcgaacttcatcaataatagatttgtctaaactggctaaccgttttagatcagcattaaaggttgcacgtggtttaaatcttagttttttcattatttaaactgaccccaataatcatcatctgattcaacaatttcatcgtcaggtaaaacatggcgtttaattaactgatcacgtgcaattgcatattctaacgagccttctttagcttttaatgctcgttctagccaatccattttttcttgtgaaacgatggccactgcgcgactatttgaacgagcaatataaacggtttcgtcttcgtcattaacttgatctaaatatttttttaagttagcgcgaaaatcgctctgtgttaatgctaatgtcatatttaccaccctttcattgtacttaatattgtactttaatttgtactaaaaatcaattttttaaggagctcaaactatgcaacaagttgtcttacccatcaaagattcaaacgttctcaaagaggttcaagataccttactcaacaactttaaagctggccggcgtaactatacagtttttcaagttggcaaagcgacactgctgcgagtcagtgatgtcatgcgcttaaaacaggccgatatttttaatccggacggttctattaaacaaaatgcgttcattcacgatcgaaaaactggtaaaccgaataccttgtatcttaaaccagttcaaacagagctcttattgtaccgtcaatggctacttgatcatagactagcctctgagtggctctttccttccattcaacaccctgagcgccatatcacggaaaaacagttctacaaaattatgagtaaggttggcgatctgttaggaattaattatctagggacccacacaatgcgcaaaaccggggcttatcgcgtctacacacaatctaattataatattggtttggtcatgcacttattaaatcattccagtgaagccatgactttagcttatttaggcttagaccaagccagtaccgaaagtatgttagatcaaattgattttggttagttttatttggatttttagttgtcgccaacggcgacttctgatacaggaaatttagcacaaacaccagcaattttaattgtggtgtgtaagtgcgcattgacctcgtttcactcggtctgctgataaccataaaatcagtttttgctgttgttaaactgaatgtatttttaattcaatttatacttgcacttaactaagtttgttatgctttagatacttaaaaagtgttgcagattacgctgttttaagccaaaattttttaattgctttgtgcagataatctttataagcttggtaacaaaatttgaatgacggtgctgtaagatctgtgaatttaaactgaaagcattattttgacgttaggagtcattaagatggacgaaaagaaagtattaaaaccaattggtgaaatgcttgctgatccttggcaagttgatattcaagaattgtttgaagcttctgtcaatgaacctgacgagattaaaaagaatttgtatgattccttatacacttatattttgcaaaaaagacaagaaaatattattaatcatcctggattcgttatttagccctctaaaagcctgctgagggctttttatttttgctttggtataaatatatataaacagtctcaaaatcgctagaaacgagaaataaggcccttaaaaacgaatatagcagttagattcttgttaagattcaaaaaaactaactgtttgctgtcaatggtagcggacgagcgtagcgtgggagcataaggaattgacagctctaaaccagtcttaacactgaattggcgaaagccaaagtttctataaaactttgctttcctgcctaacggcgagtgaaaaagcggttaagctggctcagcttggacgggggttcggggcgttagcgcccgattaaatgtggcttgccaccccttttaagcaacgaacaaagtgaggcgcaagaagcgtagcgagtggagtttaatgtgagcccgtttttgggctcactcctttgtatttttgttttagattttaatctcgtacagcggtgcctcttttatacctcttttataaacctcttttaaacctcttttagacccctcttgcgccttactctaccaaggctcacagaagtttatcaacgaggttttgtctgtttatcaacgaggttttgtctgtttatcaacgaggttttgtctgtttatcaacgaggcttttaatggtgatcgttgataaacaatcgttgattttatataatagttgtggaggtgtgattatgagcaatgaacttataaaatatgatcctgaacttaataccattccgttacgtaaattcacccctattgaaatgaatctatttttttcaattatttctcgtatgcgtgataagggagatcagacagttagattttcttttgaacaacttaaagatttgagcaactacaaaccgactgcaaataatcgctttgaagatgatattcaaagaacttatgaaaagttaatgggacttcattttggaagacgtagtaaatctggattaaatagagaaatgtttgttatgtttactaaattcagaattgttggtgaaactgattctccttatatagacattgaagtatataaagatgctttgccacttcttaacaatttagacacgtgggttagatatgctttagcggaatttagagatcttcgaagcagttatgctaaaaccgcttttagattgttaaaaggtttcagaacaaccggttatgcttttttatcaaaagaagatttttttgagttggtagattgtaaaattaatccgaacgctgttcggacaaaaaagatcagcttcctttaaaatggtgtttaccacaaacccatcttttaggagctgatcttttgtctagtataacctattttgatataaggcaaaaattccgccctcacgcttattatcggcttgcattgcaatgacaacatacttcaacgttgtaatgatcattaatgtccaaaaaatcaacgagatcgatccaatcacgtaatcgggagaaatatttcccattttaccggcgtcaccaatcaatgcattcataacatacaatggtgaagtgccaatatcaccgtacacaattcctaaagtaacaagtgcccccgcaaaagaaacacgttctagttgcttattcataattacttgcctccaaagtcatttcttgaaatatggcactgaaaaatagtaagcctaaacactaagaaaagcaactatgccatatacatcataatgaaatcactttaaagaagttcataatttacgatatactgattgaaaccataaattatgggtcttctattcttaactatctagttgaaccatctgataaccgactccaatgtgtgttttaatatactgattctgagtattaacttcaatcttttttcgcaaagttgcaatggtcactcgaagagaagatgtatcttcaaccgattctgtcccccagacctctttcaacagatagcggtgtgtcaacacgcgggaagtgttttcagcaagaataatcaaaaccttatattcgattggtgttaaatggatttcattttggtttactttgaccgtttgtgaatcaaagttgatagtcaattctccattacaataattattaatattggtttttccgttgttatatattatgttagtccttctcaaggaaacacgaattctagccagtaattcatcaatagaaaagggttttgttaaataatcatcagcacccaaatctagagcctgcactttgtcggcgtcctcatcacgtgctgaaataacaataataggtatattattgttggcagctcgtatttgcttaataatgtccatcccatccatatcgggtaacattagatcaagtaaaagtacatctggttgaaaaattggaataaattggagcgttttattgccatttctagctatgccatacttataatctgcggatcttaatgtcatttgtattaatcgagctacttctggatcatcttcgacaatcaaaattctatttttcattttttttgctccaaataggtaaagtaaagtaaaaacatacgccgttatttaaatttttagcccaaatattaccatcataagcttcaataatagatttacacaatgataagccaattccaagccctctttgagcccttaagggttgcttttgtttgccagtgtaaaacagtccaaataggtgagccagatcaccattagttaattttggtccgttatttgaaatctcaaattggacttgattggtattcttttgaaaaattctaatcgaaattttggttttttccggtgtgtgttgaatagcattgttaactatattaataatgacttgggtaattaagtgtgcgtcagccatgaccattaataatggatcagacaagttaacggtaatcttatgatcttcaaatcctgggctaagatgttgcaaagattcttgaataatatcatcaattaactctggagaatgacgtacttgaagactactctctaaacgagtcattgccaatagattctccactagactaattaaccatgaagagtcattaaatattgattcatataatgtatacttctcaacatcactaagcttatttccttctcgtttcaatatatctgcactaccagaaatatttgttaacggtgttcgtaaatcatgggagattcctcgtagcaagttagccctgagtttttcctgatgcgatttaatttcagcttttcttttttcatttaggattctcatccttgataaggcttgaccacattcatccaatatcgaaataattaaattacgatcaaatatttccaaagatcgttttgaatttattgctaagcctataaccgcaacaactgatgaaggggaatttccaaaaataggtaaatataaacactttgcttgtggtaaagtattagtagttaatccagcttcttgaccattcttgaatgcccaggttgcaatggctttctcgttatcactggaaaactcataaaaagagctctggctttggtttaacagataaattttaggttgcagtaacttagaatcctggcattcataaaagaccattgtagcactataaattttttgtagttgttgaacagtcgtgtcaataatatcggttgataatttggcttgttgcaatttacgaatagtttccaacagcacctctgtttggtagacacggttagagttatattgaacttggtgcttcaattttagtgtccaataattactgattattgaaactagtagcattaaaaaaaatgtcaacaagtaaactggactactactaagagaaaaatagggtttggtaaaaaataaattgaaactaattactgctaaaaaagctgataagaatccatatacttgatcttttaggttaattgcgcagagcatgatccctaacatataaaccaaaacgacatttaccaatggtacttgtgcaaatattaatagttctccaaccactgtgcttcccaaaataatacttgaaatcattagcatatttttagccatgcgcttagagccagacttactaagtgaacctttaaaatgggttaaaaatgtaccatttaaatgttggacttgattcaaattagttttagcactattaattacatactcatcaacttctggtaacagatatcctatttgatacacaagtgtagatcgtgtttgccatatttttttataaggactagccccaagtacaattttggttacgctgctttctttggcatactctgtaatttgcagagctgggttctcaccctgcaatttaataacctttgcacctagttgatgggcaaggctaatgttattatttaagttttcctcccatttattaaactgattgttcttaacataaaccgcaatgaagtcactattaaaagcttgagccatttgtgcagcagaacgaatgacacgttcattactcttagatccggataaacagactagtagccgatcagtacctacctttgagttggtagccaatcttaaagtcattttcctcaatgcaagttctcttaacgtagtaagattttcagatttaaaaaaattagctaatgcttgccttatatgatttctagcatatatttttccaattttaagtctattgatcagatcattgggttcgatatcaattaacttgacctgatttgccatatcaaatatataatctggtactcgttcttgaatatcaacgtttaattgttcaaaaattatatcgtgcaggctttctagatgttgaacatttagcgttgtataaacattgataccagcagtaagtaattcctgaatgtcttgataacgtttcaaatggcgactttttttcgtatttgtatgtgctaactcatcaactaaaattgtctgtggatgtcgttccagtgcaccatcgagattgaattcttgaagatacattcccttataggattctttttttacagggattgattctaaccccctagcaagattgcgtgtatctgccctgccatgatcctcaaggtatccaataatgacatcctggccctcctgcttcaagtcctgtgcttctgctagcatagaataagttttgccaacaccagcggcataaccaaagaaaatctttaatttccccctgcctgaagtttcaagatttgcatcttttaagtacctacttgcacgttcattttgattcatctagttatccctccaaatagaatacaagaatatccttggtaagtatactatcgttctaactaaatttacccaaaaataaagtcttgtcttttataatcttcaaataaagatctttataggctctattacatatgacacaaaacccctaaatgattatcacatatggtaatcatttaggggcttaacccgcgacttatctcagctaagcttcaaaagttattttgatagtttatccaaggccagattagtttctagcacgttaacccgaggttcaccaagaattcccagagtgcgagttttggtattttggtcaatcactcgttgaattttttgaacactgacatgccgagccttagcaattctcttaacctgatatttagcagcagttggtgatatttccggatctaagccacttcctgaattagttactaggtcaatgggaacatgtcgataagtggcattaggattcaatctttttattgtcttttctttatcaataatctccttttgataacttttatcgttagggctcatttgtgaggccacagagtacataatatttttattgtttttttgtccagttatatcgccaacagtaatatccatctgtctaccccacaggtattttttgcttgtgaatggttgtgcaattagtgctgatccccttactgtttgatcagatctaactaaactgccatttgcttgtgaggtaaaaaaggtttgcccaattgcactaacaattaaggtatagataccacaaataatcgttatgacaattactgccaaaattgacttacctaatgtcttaactaccattattgtctttctcccttctcatagaatctgtagtatgagtgcaatgatcaagtcgatcaacttaattccaatgaatggaacaactatcccaccaagcccataaactagcaaattatgccgcagtaactgactagctggaacttctcggtaacgtactcccttgagtgccaggggaattaaggcgacaataattagtgcgttaaaaatcaatgctgacaggattgcacttgttggactatacaaatgcataatgttaagcacatttaacttgggatataatcctacaaacatagccggaatgatagcaaaatacttagcaatgtcgtttgcaattgaaaaagtggttaagcttcctcgagtcattaataattgtttaccaatttggacaattttaattaatttagttggtgaagaatctagatcaaccatattaccagcctcttttgcagcctgtgtacccgtgttcatagctacagcaacgtcggcctgagccaaggcaggagcgtcattagttccatcgccagtcatggcaactaaatgtcccttattttgatattcacgaatggttttcattttactttctggagtagcctgagatagaaaactatcaaccccagcttcagcagcaatggcagcagcggttactggattatcgccagtaatcatgattgtctttatgcccatcttccttagatcagcaaatttttccttaacgccgggttttatgatatctttcaagtagataacaccaagaataacaccattcttgcatactactaaaggtgtccctccctgttcagcaattctcttaactgctatttggcattcttcgctgtatttatttttttttgtcaggacatattgtttgatattctccgaagcacctttacgaatttcatctccagcaaaattaacaccactcattttagtttgtgctgaaaatggaataaacttagcctgatttgcttctaagttctgttctctaaggctatacttttcttttgctaatacaacaattgatcttccttccggcgtctcatcagctaaggatgaaagctgtgccgcaattgctaattctttttctgaatggccatcgactggaataaatgctgaggcacgtcgattgcctaatgttattgtcccagttttgtccaggagtaatacatcggtatcgccagcagcctcaatggcccgaccactcattgctaaaacattagcttgattcaatctactcatgccagcaataccgatagctgaaagaagtgctccaatggttgtcggggctaaacaaaccagtaatgcaattaaccatacaatagacattggatttctcatatcaagtatctgagatgataactgagaatacgtgtataataccgccactaccaacacaaatatgatagacaatgcaactaaaaaaatttctagtgcaatttcattaggcgtttttttacggttagcaccttctaccattccaatcattttgtccaaaaaactagcaccttgttcttgtgttaccttgatgaccaaatgatctgataaaacagtagtaccaccggtaacagcagagcgatctccgccagcttctcgtattaccggcgcagattcaccggtaattgcactctcgtcaacagaagcagctccttcgacaacttcaccatctgctgcaatggtttccccagcttcagcaaggaatagatcacctttatttaagttttctccactaactttttcaatatttgataaatcgccaactttatttaacctttttgccattactgcacgttttgattttttcaactctgccgcttgagctttaccgcgcccttcagcgacagcctctgaaaagtttgcaaacaggcaagtaatccaaagaattacagctactgtaaagataaaaccactacttacaattctgtctgagatgccaaaaagcgataaaataaataagatagttgttgcaattgctgatacataaactagaaacatcactggatttttaatttgtaggttaggctttaacttaagaaaagtttctttaagtgccgctcctaacatttttcggttaaacatttgatttttctctattttttcattcatagtcagacccaccttactaattttagaaacgcataatgtaaaatcatattaatgtgtcaaaaagtccgctattggtcctaatgatagtgctggaaagaaactaagcacgccaatgattaatacaacgattattaacataaaaacaaaggttggacttgtagttgataatgttcccgaactactagcaacaattttatgctgtcccattttaccagcaatcgccattatagcgataataggaagaaaacgagaaatgatcatcgcaacagctaataaaacattgaaaataatggtattaccattgaaccctccaaagctggaaccattatttgcccctgctgatgaaaaagcatataaaaattcagagaatccatgtgctccactattgctaagactagttaaagtactctttaacattgctggaatagcactgcaagttaaaattgcaattggcgttgataggcaagcgataacagccatacgcatttcgtaaggcccaatttttttacctaaatattctggtgtacgtcctaccattagcccagcaataaaaactgttaggatgataaatccaagcatgccgtacaatccagatcctacaccaccaaaaacaacctcgcctaattgcattaaagccatgggcattaatccgcccagagaactaaaactatctaatgttgcattcactgcgcctgtagatgttgcagtagtaacaatactccaaacagctgatccaggaataccaattctagtttctttgccttccatagccaaattaccaatatgagctaaagtgatcccatgttgttcaacaattccttcaaatattaacgcaactacaaacataattgccatagctgagaagattgcccaaccttccttacgccgctttaaagattcaccaaagctaaaacatagcgccatgggcagaagaagcattgccgttgtttcaataaagtttgtaaaaggtgttggattttcatatggatgggcagagttagcacctaagacccccccaccattagtccccaataacttaattgatacctgggaagcttgtgggaataacggtaaggtttctttagttataatttttgccccatcgattttgtgatttttaatcctaactgtattttttttgacgttaatttcagccccatgaatcgcctggttatgtttatcaacggcaacaggttgtaccaaggtagcagttttataaccaccagttgtttgaggaacaccacctgccatgagcataatagacataaacaaactaagcgggattaaaagatatagaaagatcctggtcaagtctcgccaaaagtttccaattgcttttgcttctgtacgttggatacctctaattaatgcaaaaagaaccgcgattccaacagccgcagaggcaaagttttgaacagttaaaccaatcgtctgagaaaaattagaaagagccatttccccagaatatgattgccaattagtgttggttacgaaactaacagcagtattaaacgctaatgaccaagaaagccccgaaaaatgttctggattcccaggtaaataattttggaatttcaaaatactaaacaaaactaaaaaactaactaaagaaaacattaaaatacttagtaagtaagttttccaactcatctcgcgattagacacacgaaaaaatttatatattttgttttcaattggtcggataattctgctcataaaattgttctgatcattaataatatggctgatatacttgcctaatggaatggctaataataatggaacaatgatatatggtaaatattgagcccatgttggcatactatgattctcctttcactagaacataaattagataagctaataaaaagattgttaagatcgttcctaagaccaaaaccatttgtctcacttccaattaattttttaatttaatcaagggtgctccatcacgttaatgcgttgtttccaaaattttctaacactaataggaactttgtctgagaatccgtagtcaaatttaagatgctgagcagtatcgaaaaaataaaaaattgtaacatctgctatgaaaaggtctcctgaagtactttgaatgtagccccccatcttttttttaatatcattatcaattaaacaaattactttttctcgactatactggtccgaataatctttgtaataatagttatcaatcattttgaacatctccaaaacatatttaaatcaaccaaagatatagtatatgaaaaggtgttaaaatggtgttaatatttaaaatctcatgttaacattttgttaaattttccatcttaaggcgtgcaatttcgagttctaatttgtctttgtcatccatgaaactcaccttccgtcctaatttattaccgccattataacagaatttttcaaaaatctcccacctatccactccaacaaaaaaagcccctctaatcttgtggattagaggggctttaacgtgctcttggttgcaacaacttccgcttaatctaaaataggcagtcatcccaaatttcgggataactacctatttggtattaatgctcaaaagttgatcagcttgaacgcacttctatttttaacgtgcttttcaaaccatacttctgcggctagctacgtcccgcaaacgatcgactccgtcgcccattcacgaaactaggctagtcctcaaagtataaccggcttgaacgcacttctatttttaacgtgcttttcaaaccatacttctgcggctagctacgtcccgcaaacgatcgactccgtcgctcattcacgaaactaggctagtcctcaaagtataaccggcttgaacgcacttctatttttaacgtgctttcaaaagcatcctattccggttagctacacatgcttacagcaatcattcgccctgttaggctaatcctcacaggataaccacttttgacgcacttctattttttgtgtttcttgttcagaatcttgtcgaacaagttgttgtcttgtgggttaagtgagtcaccacttgcgactgcaaatgcttttagcgcatcacgttgtttactgttgagggtctttggtgtcacgatgttaactgtaacgttttgatccccattacctgtcccgtggagcttaggcgcacccttaccacgtagacggaagacggtattcgtttgagtccccgctggcacttttagtttaacaggaccatggactgtgttgacttcaatttcatcccctagagcagcttggacaaagctaattgggacttctgaataaatttgtgcgccatcgcgcttgaattcagcacttggtgccacgcggaagacgatgaataaatcgccataagggccaccgtttgtgccggcttcaccttggccttgaagacgcatttgttgaccatcttcaacacctgctggcactttaaccttaacagtatgccgttcatcttcgtgacctgttccatgacatgtttcacacttgtctttaatttctttaccagtcccgccacagacatcacagacttcttgagccatcatgcggccgaaagctgtttgtcgttcaacttggacttgacctgcaccgtgacatttgtgacacgtttgggcgcttgttcctggtttagcaccagagccatgacacgtgtgacattctgattcacggttataagaaatcttggtttctttgccgaaaatggcttcatcgaacttcaaatccatccgatattgtaaatctgaaccttgacgaggagcgtttggttgttgccgagcaccgccgccaccgaagaatgaactaaagatatcttcgaaaccgccgaagccttcagcaccaccaaagccgccaccgaagccttggcctgcgccgccgccgaaaccaccgttcatgccagcatgaccgtattggtcataagctgcccgtttttgtgggtcacttaatgcttcatacgcttctgtgacttccttgaacttggcttctgcatctggggctttgttaatatctggatggtacttctttgaaagtttacgataggcctttttaatctcatcatctgaggcgtctttacttatccctaagacgtcatagtaatctcttttatcagccattgtgggcctccattcatatacttacgcgttaaatctatcttatcaaggatagcataattgactgattaaaaaaagccaaggccctagaccatactaggttttggctttttttaaaacgcattattatttgtcgtctttaacttcttcgaagtcgccgtcaacagtaccatcgtcagacttaccgtcagttgcattaccttcagcaccagcagcttgttgtgcttcttgcgcttgttgatataacttaactgttaattcttgaacgatttcactcaacgcatcgcgttttgtcttcatgtcttcaaagttgttttcttgttgtgctttgactaattcttctttagcatctttagccttttgtaattcttcgtcagaaactttaccttcaagttctttcaaagtcttatctgtttggaagattaattgatcaacatcgttcttcaaatcaacttcttctttacgtttgttgtcggcttcttcattttcttgagcttctttcatcatccgatcgatttcttcgtctgataaaccagagttactcttgatagtgattttttgttctttgtttgtgccaaggtctttagcagaaacattaacaatcccgttcttatcaatatcgaatttaacttcgatttgtggcacaccacgaggtgcagcaggaatatctgttaattggaaacggcctaaagtcttgttatcagcagccattggacgttcaccttgtaagacatggatgtctacggcaggttggttgtcggcagctgttgagaatgtttgggctttgcttgtaggaattgttgtgttccggtcgattaacttcgtgaagacaccgcccattgtttcaatccctaatgataatggtgtcacatcaagtaaaacaacgtctttaacgtcacctgagataacgccaccttgaacagcagcaccaagagcaacagcttcgtcagggttgattgagtgatcaggttccttgcctgtccagttcttaacagcttcttgaacagcaggaattcgtgttgaaccaccgtttaagatgactttgtcgatgtcgcctgattctagaccagcatctttcaaagcgttcataacaggtgcttttgtccggtcaactaagtctgatgttaacttatcgaattcagcacgtgataaagtcatttccaaatgtaaaggaccgttttcgccggctgagataaatggcaagctgatttgggtgcttgtcacaccagataaatcttttttagctttttcagcagcatcttttagacgttgcatagccatcttgtcttttgacaagtcgataccgttgtctgatttgaagttttcaactaaccagttcatgatggcttcatcaaagtcatccccacctaaatgtgtatcaccgtttgttgataatacttggaagacaccgtcgcctaattcaagaacagaaacgtcgaaagtcccaccaccaaggtcataaactaagactttttcgtctgtttctgtcttgtccaaaccgtaagctaatgctgaagctgttggttcgttgataatccgtttaacatctaagccggcaatcttaccagcatctttagtggcttggcgttgtgaatcattgaagtaagcaggtactgtgataacagcttctgtgacttcttcaccaagataatcttcagcgaatttcttgatgtattgtaagatcattgctgaaacttcttgtggtgtatatgatttgtcgccaacagttactttgtaacctgcttcgccgatgtgacgtttgattgatgcgattgtatcagggttagtgattgcttggcgttttgccacttcaccaacttggatttcgccgtttttaaatgacacaacagatggtgttgtccgtgcgccttctggatttgtgataatttttggttgtccgccttctaatacggcaacagctgagttggttgtccctaagtcaataccgattactttactcataaaaaataccctctttttttagatttttagtttaatttattgtgcaacaacgaccattgctggtcttaagacgcggtccttcaagtagtagcctttttggaagacttgtacaacagtatccgctttttgatcaccatcaacagcgaccgtttgcacggcctgatgaatggtcggatcaaaggcttgtccttgcgcctcaatttccttaacgccatgatcttctaaagcatgtttcatatgatcgtatgtcatttgaacaccctttttaagactctcagcactatcatcagttgcttcagttgccaacgcacgttctagattatccaaaacgggtaagacatcttttgcaagtgattgcccatcatattttaacaagctagcttgttctttttgatgacgggtttgaatgtttttaatttcagcttgtgaccgtaagaaactatcttctaaatcatcatatttcttttggagttcagcaagttgagccgctaaatctggcttagctgcatcttcgtcaggtgcagcatcttcgatcacttcatctgcttctaattcaggttcaaatggcgtttcttctttaggtgtttctgtttctggcatttctgctgctggcttttcttgtttctcagccttttcttgcttggtcaaacaaacacgctccttttaagattgatcatcatcgaaattcgcataataatcaattaatttcttcgctaactcttcacggaataaatcgagtaacccaatcatccgcgaatagggcatgctagtggggcccagtagtgcaatgactccctgtccgtgttcaccaacgtcataattaacagtcattagactataatgtttcaacagatcgttggccatctcggtgcccaggcgaacctgaacttggctattggcgcctccaggggacaaatctagcaacttggctaaatcatctgaacgattaatcatgttatacaacgacttcagctgggtgacatcggagaactctgaaaaattcaacaagttcatctgaccgccaacaaataagcgctcttgactcgcctttttcaaaacatcgtcgaagatgtctaaaaagccggtcggagaagccatgtactgggctaatagcgccggtacatccgtctttaacttctgactaaccacggttaacggtaagccaattaggtgatcattaatgattcgaatggctttttcgagttcatcacccgaaatcgcttgtggaatggtaaatacctgattatcaactgtccctgcactcgtcacgataatcgccatcacttggtgattactcaacggtactagacgaaaaccagttaaccgaatctcagccacttccggtcctaacgcgattgctgtatagctcgttaggttcgataagatattagccgattgtgagacgatttcatcaatcttatgatagtgctgtccaaatgattgttggaccgttgccacatcaaccggattgagggttgctggttgcatgagatggtctagatagtagcgatagccttgcatcgacggtacccgtccagatgacgaatgcgtcttctcaattaaaccgacactttccaaatcagccatatcattacgaattgttgcagaactaacgtgtaccggcaattctgccattaacttcttagaacccactggctgaccactctctgtaaaaagacgaataatttctttcaaaatcattaattgcctttcggtcagcatgtcatcacctctttttagcacttgaatatcatgagtgctaattacaattattaatatagcaagaacgtcaaataaagtcaagaaacgtaccggcttttttacggatttactgaaaatcggtccttagacggagggccttactggaccaaaggacaaaataaaaaacgagccgcttcttagatggaagagactcgctttatgaagtggaatatttataacgtgcttttcaaaccatattcctgtgcctagcgacacaaggcgaatgctcagaatatcccccggtttgaacgcactcaataactatctagcagaaactcttggaagacttcattgcctaagaacttacctgattcagttagtcttaaccaatcgccttcttgtttgaggtagccctttacaatttgggtggcaactgtttcgccgtaaacattttgtaatggataattgaatttatcttgaaaatgactgatggatacgccttgcatcgtccgtaacccgaggaagagttcttcctccatttgttcggtcagtggcagaacatggcgttcaatgactggcaccttattttcttttaagggttctaagtattgttggattgggccgaagttatggtaacgatccttacctaaatagccgtaagcaccggcaccaaagccaaaatacttttcattgcgccagtaagttagattatgcgcagattgaaagcctggcttggcaaaattactgatttcatattgatctaagccagcccgcttgaaactatcaatcgcggcttgatacatatgtgcttcaacatcttgcgatggtaaatgcaacttgccttggcgcatcaagttatagaagattgttttgcgttcgagaatcaatgagtacgtcgaataatgcggtaagtcgagttcaattgccttattcaaactatccatgaaatccgcttcactttgttgtggtaagcggaaaatcaaatcgatactcatattttcgaagccgaccttgcgcgcgttatcgattgcccgataaacatccgcacttcggtgaatccgcccgatctgttttaaaatctgatcattaaacgactgcacgccaatacttaaccggttgacgccgttgtccttcagaacttgcaatttttcagtatcttgtaagtcattaggattggcttcaaacgtaaactcaccaccctcataaggtaagtattgatgaatcccatcggttaaacgttggagttgtgctggtgataaagtagttggtgtccccccaccgacatagatcgtatcaattggttcgtctgggtattctgccatcactaattgaaactcgcgaatcaacatatcgacataatcatcgaccggttgaccttcaatgaaaaccttattgaaatcgcagtagtaacaaatatgctcgcaaaatgggatgtgaatataagcgcctgccattaatgttgtgcctctaatttctcaaaataagttcgggtatcggcttcgtcttggtggagttggtcaatcaaggcttccgcggagtcaaacttcacttcgccgcgtaagtagtgataccaatccactttcacttgttcaccgtaaatatcgccattgaaatctaataagttaatctccaccgttaccgggttattgctgtggaacgtcacattccgaccaattgaagccatgccaatataccattgaccgcgcactaaaaagcggaccgcataaatcccaattcctggtaatcgttctggtcgttgcgattcgatgttagcagttggaaaccctaattctcgcccgcgtgcttcaccatgcactacttcaccggtcgtttggtaaacataaccgagtaattcattagcttccgcaatcttaccagcatctaaatcctctcgtactaatgtcgagccgattttgacaccattatggtcatgttctgcaactgtcacaatggcaaagcgccctttggcatagtctgacaatgtcgtcatattcgcaatctcttttttaccataagtgtaatcaaagccagccaccactgtatccgcatgtaaagcgactaagtattgatcgacaaatgtttgtggggctagttgtgcaaatgcttcattaaagtgcacgatgtagaaaacatcaacgcctaactccgccatcaattcttgcttgcgctcaaccgttgataaataacggaatgactcccgatcggcattgcgataaacaatggcaggatggatatcaaacgtcatcacagctaatagtaaacctttttgaactgcaatttgttttgctttccgaattacagcttgatggcctcgatgtacgccatcaaaaaagccaagcgccaagaccacttggtcagctggcacttgttcttttgaatatggatgaattaattcaatgacacgcatatttttcacctagttttttttaatgagtcccttgattttgtaaatacattttataagggcgataaagatgttgcgctgctttttcaacttgatagagcgccttgatatgcccttgataggtcaacgccacaatctcatcggtttgttctggcaatgtcaagaacacaccgtttaaaagcttggcccattgatcgtcgtctaaagcaatcttcttgtaatcttcaaatacatggtcaattggcaataaaacgtctgccagttcgcccgcttcagctttttgcgccaattgttccaacgtgatacagttaccaatttgaatgccgccactcttaagacgtgtcaaatcggacatcactgcgggtaaaccgagtttacgaccgaaatcaacagctaatgtgcggatataagtcccctttgagcaaccgacaatgaaccggaatgtttggcgcccagattctgcgtcaaattgtggttcaccatccaaatcaaactgcgtaatcgtgattgaacgttgtggccgttcgactggatcaccagtgcgcgcatagtcgtataaacgccgcccattgactttcaccgctgaaaacatggggggaatctgaattgaatcgcccagaaaactagcgagggtctctttgattctctcagttgaaaaaggttctgttaagcgcgcctcttcaacgacttcaccatctaagtcttcagtcgttgttgataagccaagggtgatttcacccgtgtagactttaccagaatgcaccaattgatcaacaaccttcgttgcttgaccgatacagattggtaacaccccatcgacgttgggatccaacgtgccagaatggcccactttcttcatgtgtaaaatgcggcgcactttaaacacacaatcgttactcgtcatgccgcgttctttatataagggtacaatgccgtccataagtaatctcctttaagtattaactaaactattatagcatagagtgtgaagtcgaacgggattagctttatgatgctgctcaatttattatcaaagcacaaaaaaagatgggacaaaagaaactcttgcccatcctcgctcaatgttgttttatttgaggactccttcatctttaaataagtattcagcattcttaagcgaccaatcaacatttcttttttgtttctcttactcatgccagtgacattaccaccgtgtcgaacatagtccattaaagtagcagaagtcgccgtaattttaaaatgattctttttagcaacaagaaacagccactgatcatgcatttcgattttttctggaaaaggcaacgcggcatctaataatcgtctcgaaatagccatcatggcaccagtataaccatttttaattaaattactaaatacactttggtcaacttggttatggttgtagtgattccatgactgatcaacaacctctccattctttccaataacagttgcatcatggacaattaaatcagcgtgcccatttacataagcatcttgaataatttccactttatcatcatgccattcatcgtcttggtcagaaagaaaaacaagattgcctgtcgcaagtcctagtgctttctcaaacgatttaattggtcccatattctgatcgtttcttttcagaattgtttgcccgttaaaattgaccaacaactccctcagtaaccccattgtatcatccgatgaacaatcatcgataatcacaatttcatcttgcgcggttaattgcttgataattgattttatctgtttgggtaaggttttgacaccattataagttgccatgcaaacagaaatattagtcactctgtctcaccaaatctttcatttaaaacggtaagaatgcatcattcttacccattttttcatttttaaaatccttgtaggctgtattaactagtttgacggcagcaaatctagaatattggccttttttctttaaaaaggcacccattgcatatctgaaatgttcataccgtaattgcttagctagaatttgttggttctcacaatgtaacttcatagtttgccaacgattacgataaccatagtagtccttccagccaattggacgattaacaccacttgctccgacactattattatctgttagatgataaatcttagcttggatattattgatcatttctgtttccttgcgaatacgaagtgagtattcaatgtcatcataccaaataaagaaattcttttccggtaagccaatcttctttagcacatcttttctcaaaaaaactcctacaaaagtagcaatatcaactggaaaattaccttcatagctcgttaagtcaattttagataattgtagccggtccaaatcatcaattttaacacgatgttcggttccaatttcaccatcttcgataacagttcctgtaaaacaaccgatatcggcatgtttttcactaagttcagccattttcttcatataatcttgatcatagactgcatcatcgtcagcgatactaatccaatcaatttcaggcaactcaagagttgccgccaaggccatattaaagccacctgcgccacccaaattatcttctgaatgaatgactttaatttgtgcgttatcgcgcgcttttgctttcaaaaaatctagcgtatcatcagttgattgattatcaacaaccactattttttcaactggcgcggactgctctaataaactatcaatcgccttttctaatttatccctacgattatgggtcacaataactgctgcaactttcaaattcttatccacgctttcttttaaacaataaataatttaataaatagaaatttctctgcttaatcagtaatcctaatagtttctgtttcattggcatattgactaatctcgcattttttatttgcttactaacaacaggcgtttctagataagtcttaaactcattttttctttcctgatatgacttagagttgcttagattacaaaaatctgcaaacaagagttcaatcgagagtctcaacatataagaatccaaaaataatgcgttatctgattgttgtaaccaatctactaaatcatcgttcagatcattcgaaactgtaatgaaactttccttaaccccttgtcggtaactattactaattgaattatcatgatcaattctatagtgatacagtatcgaatcaacaatgttaattctagggttcttcaagaaaacctcaatgctaaataacgcatcttctctcttaataattcctgctgggtaaaataattgattagcttctaaaaaagactttcgaaacattttggcccatggtgttccaagaaaatatccataaatgccattataataagcgccatccgaaagcgttgcacgaattaaatcatccattgataccggtgtagcgggaaatagcttatctttaggaaaactattttcaactttaccgtcttgatatactcgatcaaaaccaaaaaagataacatctgcgttagtacttgctttttctaacaatatttcttcaaatttctctgctaataagtcatccggatcaacaaaaagcagccaagttcccttagcagctttaatccccgtatttctggcaaccgatacgccctgattagcttgttcaatcaacttaaaacgcttgtcttcttctgaaaagcgtctacaaattgctactaaatcatctctagcgccatcacttattagtaagaattcaaatgaagttgtcttcgccaactttaagcgttccaacccagcctctaaaattgaattttcagtaccatagattggtaggatgaaactaattgtctccatcaaaatcctcctaaattttcaagtaactcttattagaataatctgcgtatgagtcgattagtgcaaatataattggatatgctagttgtaagctcaaaccagttgcttgaatcatatttgaataaatagttaatgcaaatattgtatttaagacggataacccgacaatgaaaaatcttgaattcaacttatataagaagtacagatacacgtatgcacccgcaaagataataatgacgtacatagtaacaccaatccaccccaataaacggtaaggactacttaatgctgtcccgacattcaattctggtgtaatttgttgaattttgacctctttataatctgaattagcaagtgctctcttaccaatgaaattgggcagtaactcaccaaaaaacatactatttacttttgaaactgttattttttcagtagtcttgctataatctacatttttttgaaagttagccacgggtgatgaagcgtaaatataaccccaaaagaactccttaggaatcttactacttttaaatttttcagttgcaccaccgatttgcataattgacgctgaatcaaaagctgatcgaccattttgatatgacgtgttcactcgtgcatttcccataacaccaaataaaaacagacccaccataccgaaaatcgctaaaccaattatatgtctaactttaattttcttccagattgctagaataaaaatggtaaaacagtttatcatcaccatcatgaacattccgcgattaacttctaaaacatacggaatacaacttagaacacaaagtagtatatattgatttctcaacttcccagttgaagagaggattagatgccacaagtaggttgttaaaaaagctgtcagagtgagtaaaaaaacgtgaactgtcggaattccaaattctgtataaccggaatccttaccttggagcataaactgtaatggaaaaccatgattgtaggctccttcagctaatgtgcctattaaaacaataaccactaaccaaacaacatttgttgtactcttaattttcttaaaagatatcacattacttttatagataaagtatcctagtacgccggctaacaagaacattacaataaaaaagaaaataacatcactcgaaaaacttggataaatactggaccagccaaaaaagaaacttagaataactgctgaaaaagccagaatgaacataaagaacggattaaccaaatcgttccctcctaattctttctacgcataacaataaaatgaatagcactgaggatgaagcccaatactgcaccatagatgatgcccataatagaatttgttttcttattactaaagcctattgttgcagttgtatcttttgaagcctggtcaatcacaactaacttactcttctcgtcatcatacttgatcacttcttttttcaaaagctctgtcgcatacttagcacctttaatactcttggcttgcgtagcgccagtatatttcacagctatgactttagatccgttgctactatcaattaacaaattatcgcttgaataatctctaacctctttagtcatagcctttttaaagctttgtgtcttacttaaactattaattgattgccaaaaacgctcaacatcgttatcaaaaataccgttaccttttttgtcttcgacataccccttgttaacatatactttagctgttgtttcgtaactaattgttgatttggcagtcatgatcccaacagcgccaccaatgataattgttacaaaaatgacccaccaatattttttaaaaacaacacccacagatttaaatcccacaccattttccatttaacttaactccgtttcttagtaatttaaaataatctattttattgtagcataaacagtgtctaaccactattcgttacctgtaaatctaaggaattctttaaagatttctagactttataaaatcttcaattattagcttgagattacaatggaaagcctctttaaacgaaactgcaaccattttttgaaacaaataaataaaagtaaaattaggtaactacgtgcgccaagtataaactagcacgtcgcttttccagcctaaccaccactcatacctaagtttaaaatcctaatgcattctagcttagtttcataggggtatcaattattagccaaattaaaaacacttccgatttaaattttatatttatcgaaagtgcctattatatatctgtatccaattttaacttcagtttctcacggataacctgttattgtctacaaactcattaaactgtatataaaataacacagaaagctaggccaccaattccaattaaaatgtgcgttaaaatttgatattctttctttttctcaatttgatcatataaatagaagcaaccaaaaataagtgcctcatataaaaataggaatgttcgttctcctgatgcccaaattgttggtgaaaaccccatcatgattctcgaaataagtccgagtaacatagctaccataactaaccacattcgtttagagtttcccgaagaaaatatccccaataaaacaatgcagcttactacaatcagaagtaaatctggcaagatagattgtaaattggccaaagagatatctgtcccataaatagtaacagcaccccccattttctttaatcctggataaatttttccaatcaaagtatctttaaaccaaaaaatcacgctgaacagtaccggaatatagaaaactgtacgcggtattttatatctccccttctgatttatataaaacgcaaaaagtaaaatcacaagtattgtcgcaagcacatcaaatgaaaaaaagaagtgacctaatgtactagaaatacctaactcaatttttttaaagggtgacaaagttggaaataatggtaaccaatgaatttctttgacttttctaacgctatttcctggtgctaaaacaatcataatcaaagacaatacagtaactacgaattgaaatgccaatctccccagtgcctttttatttcctcttgttacgtacaataacaatgaattacccaataataggataattaccatttgttcttgattaacagcatagattaaggctaagaaagcaacaactgaaattatttttttatgtttaatgtctattcctaaatattgagctaaggaaggtagcatcgctaataaaccggcagctaaaacccataggtaattggttgtggttgccatccaccctgtctcgtagaacatattgaaaggtaataagaagaacatcccaaaactaatcaatagacgactagcattctcatcatcatcagttcctttaagaagcaatagatacgggatatagataacagtaaacattgccaatgtgtttaataatcgccacagaattggtaagtgcgttaatgttgataataccgattcaattactagtcgagaagaccatcccgtatatcgactatgtaaaaattgtagatagtgttttcctagaacaaattgagcaaacgccttatcatcgccaccattgggtgtgatcccatttcctgttaaattaatcgataaatttagcgctattaataaaataacaattaaaataatcgcccatatttccttttttttagttattttctccatgtgaaatcctccaacttttttgacctcaataccatgattcctaaactcatagtatccatcttattattattgcatgacactagtcagtgttgtacctatttccgtttaaaatccaaaatcaacctcaacataacagccatatttgctatgcccgcaatgatcattactaaccactcatttttcaatggttttgcaacaacacaaagcttagccttttttttatttactaattcgttagaactaattgcgattgttccgtatgtttggttatgaatccattttactgtctgtccatcaattgtcacccgatagttaaatctattataggctgctactggcgtcactaaatatttattcataactacgtgtttgatcctcatatgatatgttgcactattaaaggatggcactgaatttccaaacataatcggtcctttaatatcactatacgcagctttaaccgcatagtccacaccgctttttggtccagaaaaagccggaaaataatcaatagtatgcagctgattattatacccactttctaaaatattagtcggcactatctcctgataaaaattctgagttctataaattgtcatcataccattaattagaaagattattattggaacacttattagccatttcgcccacaacgccttgactttaatcatcatacgcataaccggtaccactaagaatatagccgctaacattaataatctacccaaaaattgaattactttaataggctcaaatattttaaggtgttctgtaaaatcccaattcacaaaatcgaatccaccaatcactagtaagagtccgataattcctacaaatgcataataaccgtcgttatcttttcttcttacaattagataaataattgcaataaaggccaatattagaaaaagggtccctatattccatgttcttgcatttaaatccgtaagcgctaatggatgaagtgtatgctttaagtccacaatatatgtttgcggaaagatagaagattcatttagaggtgccgaaatattaggtgctaagtatcgattatgcatacttaacactaaaaaattataaatagtaactgcagacatcgggattgtcaaagccgctgcaatacaaatataccgagcttcttcccaattaaacttctgcattaataatctaactatttcagccaatattaatactacaatcaaaaacaacaaggatagaatatgtgaattagcaattagcgaaacacctaacgcaagcaaaagtattccaactttttgacgtttccatatcttaacaattccccacgccaccaatggaaacattgtatagccaagtagttctcctaaagcaaatctcttatatgaaagtactaggtgataattattaaataaatataaaactgcaattgaagacttgatccacaagttattggtgaattccccgataaatccaaaaatatttgcagaagcacaaatgttaaataacaaagcgaatataaatacttttaatctaagttttatcggtaataatagcggccaaataaaaagatacaaggaaaagaaaggatacattgaattgactcccaatccctgtgccgaaaattctaaaaaattaacttctacaggcagctgatacgcctttaatgatcccagtaaacttcttattctagcaaaatgaaacgtccaatcctcaccctcactacctctaactactcctctagtaagaaaaaaaggaagtacaatagtaaaaaagtataaccaatatattgaaatagatactcggttacaaaacctagcatattcttggcatttattagattaatgctagtttgttatttcatcaagctaattgcatagatctcattaatggctataaactcgccaccaatcatcaatttatcctggtaatagccttctattttcccctcaataaaaggggccacataaccattttgatcttgcaggctgcgttcgactctaacaacctgactcttttccaaagcctgacttaaacagctttcaatctcgttaagcgccatttgttcactatgccggcgatttaatttaatttcgtcttcacgatctaccttattcaaactagccgtatgatcactcaagtaaaatccttgccacttcatcatgcctcggtcttgatattggtttaaaaactgtgttaccaggtttgggtcaaattcttgtttattcataggaattccctccagcgtggccaccaactaagccagcacgttgtacagcggttgcgccaacagatttacttgataacttaatcagtgatgtgaaaccatatttttttcgaatgtcatcaaccgtacgatcaagattgcgattttttaaagttttgtactttgtatcaaacaaattcaattgcacaacattatcgtcaactagaccagcacagctaattgagatgttccgaacggcttcgccttgccacttatcacgaaaaagcgttatagcataagctgctagaagtccgttatcattggtggcattaattttcatagagtggccaaaaccacgtttcctggtttcctcctttgctctgaaagaataaccgattcctaagctaataactgtagccgctttatgatgtgaccgaattcttgtagccacctgttcggcgatttcacgtaagacaatctctatttcttcttgcttggtataatcgcgtggtagcacctgactgtttccatacgatttagccttaggtacgtacttatcacgaattaacgcccgatcgataccccaactaaacgcatataattgcccgccaataaccccaaatttctgttttaaaagaaacgggttatagtgggccaagtcatacattgaattgatacctaacttatttaatttctcggctgtcttatggccaattgaccaaagatcatcaagttgtgtcactggccacagtttgtcctgaacgtcttcatagtgccattcaccaattagactgtgggtacgtttagcttccatatcaagcgcaaacttagctagtagcggattatcaccgataccaactgttaaatagatgcccagctctttcttaacctttagctggatctttcgagccacctctcgtgggctgtctccaaaaagtttccagctattcgtcatatcaattaaagactcatcaatcgaatagggttgaatatcctcttctgccgcaaaactcttaaaaatctcatgaatggccagattatacttgatataaaggttcatacgtggtggcacaacaatgatcctattatctttaggtacgtccctggtgcgcatgacattactaattccaaagagtttcttggccattggtgaagcagccagtactaagccaccatttgtgttttcagccgtagacatgacgacaagtattgaccttaaaggattcagaccaagttcgactgactcacaactcgcgtaaaacgactttgaatcgatcataaacacgacgcggcgcgactctttagcataatcgtacattgggcataccttctcttaaagcgttagcctgataatctaaagacttctggacgtggccaaattcaatcatggtcatgttaggaatatgcttcaaacagattttaacaagttgatcgcgatcataaaaatagttgcaactatctattaagattgtcgactcatttgctagttcgtgtcgcagctgtaaactaccgtcataatgcagtacaaaatatttgtctgagttttctaaccaaattggtccttcgaaaatcattgctgtagcccccttcaaatgacattatacaaacatacgttcgctgggtcaactgaattattacttattaattagtttagaatgtacaattctgttgtttttatctctgttgcgtattacaattagaggttcatattttctaaaaaaattgaggttgtcttaatgttaaacaaactgcaaaaactttacacgtcaagcctggcacgtatcgatccaaaattatctaatatcattggtaaaatgaagctgttatggatgaaacaaataaattatattatacgtattctccgcttttttaaaagaatagcattatctgctggttctctcacagtaaccacaatatttttgttactgttttacatcatagttcagctgtgggggtttaccaacgagaagtatagttcttggcttgatggtttatgggatatgaaagctacttttatcacaacaattgggattggacttgtcagtctcagtgtaaacgaacaaaataattggcgagcaaaactaaaggttcaatatggttttagaatggcgtttacatcggtagaacaagtaatgtccgatataaatagaacttttttggttgatcaacaaattatcaacgatttaaataaggaatatgcgagaatacaaaataaagaagctgttcaaaagaatattgacaagtcagaacttgatttaaagcttaaaatattactcgaaatctcagaacacttattagaaaagataaatttcacggaattagcagttgatcagaaaaatattcaattggagctttcctacttaaatagcgagattagagaatttatttctaaaccaaccgcaactgatacaaattatttatatatgtttaataaactaaatttcagtatccatacaattgcaaatagattaagttctccttggcgatgggacaaagatagaaagcaaaagtattgcaaaataattgaaaagtataagataaataaggagtaattgtatacaaataaaatataaaaaccaaacttaattcttagtttggttttttaagtatcaaaaactgaacagtacatgacacctactttattaatatttttttactcaaaaagattagaacctaattcaactagtttatttctccatctcttgatttaacgaaattgggactgagtagctatattattgtatatctattgatcacctttttagaggttagtcttcgaatatttaacatgatttacgaccgtttggcaattcttatggtaaccactcaaattatagacatttgtaaaccacaaattaagaagtaaattctgagcggcatttccggttacacctttattacagtaagtcacagtcaaaatatttctatcaagttcgttgacgcgtttacgaatatcacctaatggcgtatttatagctgaatttatatgttgttgatcatattattttttgcacaaacgtcaataacttgtatttttttaccatcctgaagtaactgatatagcttagatatagtgaaatatatattcatctacctctgcgatctcaaaaaatggtctttaaggatattaacagaatcattacattagaagcttttaatatttctaaagtaattctttttaaaattaagcagcaaattgaattggagtcgctacaagaaaaatagatatacaaaaagcgagtttaacgccgattatcggtattaaacccgctttaactttgatgtactaggcagtagttagttacaagcggagcctcagttacccttaaaatgacaagttgaagatggccgccttgttaagaaacaataacgagcaatgtgtaaacggtacctttccctttttgaacctttaaattgcactttatatacatctacttttttaaggcttatgctaaagttgatatttaattaaaattaatcttgattaattaaaaataaatggtatattgattaaaaagagctgagaaagcatgaatagtattttaaatttacaagcgttaccctcaaaaggggaagtttctccagctaagcaggatacatcaagtggtagtagtagcagtagtagtatcgtaaataacagtacttttagtattttttgtaaaaactaacagaattatagaactaggtatatcctaataaatcggatacctagttttttaatatcaataagttctaaaagttaattcaaaggttgattcctccactataacgtaattttagtagttaactggtcaactaattattaaacaaaaagtttataaagttatatttgatgcacttaaaattgttaaataagaaatctgtcaagagttacgccgtattaatctacacaattctaaatcagctcagctttatactgaaaaaaatattttcgtaggcaatattcaatttcaatagtccagttaaacacattgctcctatcttgttttattaattatggcacaactgttcagaaatttatgtaccaaatactaggataggagcaatacttgatagtgatcttagactttttagcaaaaataattagtttatatttagttaagccttttctaaaatcatttaaaaattgagaattggtaggtgtttatatgaagaaatttttttcactgtacaagcctttattaattgatacacttagtaacaagttcgtttttatttttaatatagtgcttccaataggaatgtttataatttctaatagttatcttttacttagaacaactaatttaagtaagactcaaattatttcaggggtgagttattatttttcttatatagtatttataagtgttttaaatttaatgatactaccgcttattgtttatagagagtcggggtactataaatttttatattttttaacaaaatctaaatggacactaattataagcaatttatttgttcaattcactttcataatactcgaactacttatctttaatattgtggtaatgattattacgcatactttgttatggtcgctgttgctagaaacagagttagccgcattgttattaacggttcccgttgtattaggatcctgtgtattactgaattttagaatcagaattgagagtgcaagtattgttatatcattttttatttttctttctttttctatagcaacattatcgagtaagaattttattttcgacagccttttattgttaaaccctattaagtatttgtctattggatttaacactattagtcaacttcctagtgggatttcaatcaatacactactagaattactatttgtaactataatatatttagtcattggcattacatctgtagcaaaatataatatacgaccattaatagatcgggggtagagaaattacaatggaaattaacaatcttgatttttcataccagcaagaaccaatatttaaagatttaagtgttaacttttctgacaaaactattaatgctattatcggtgttaatggtgcagggaagtctacattattagatataattgctgggctctatacaaaaactacaaataattatttatctcattttcctgattcttgtaatattatgtatcaattgcaacatactactttcttcccaactctaactgtagaacagacactagacttatttagaaagattgataaacaagatgaccctgtaaataatcggataatgaaggaagtatatgaaaaagtaataggtccgttaatgcacataaaaatgggtatgttatcaggcggggaaagacagatggttataacgtacggtatttgtctacttaatagggaattatacctattcgatgaaccgctgagtggtgttgatgtacgaaattctgagttaataatgaaattaattacatcactcaatacagatagaaataaaaaggtgatactgacactacatcaattggaatatttaaaagatacgacagtaaatattgtatttatagatcaacaaaggtgtatatttgaaggttcatttaaagaaatattaaataatagtcaaactactgatatcgatgcagcttttaaacgactcacaaagtagagtgtaaaattcatccacttcgttgctcacaaaaaattagtcccctctgcttcagccatatttggttaattagtaatgtaaaagaatagataacactaggcaatagtgttatccattcttttacttctttataaagggttcacgttaatactattgcgccatttacaaattttagaaccaaaattcggaaatggaagaagttagccctttaatcacaccagactagttaatcatggaaaaattcatttaatcactacgctagtctcaaaaactgtacagtttttgagacttatttaaaagtgtgctatactgggatttgtagagtctcatattcttagtctcagaaaagagtgatatttttggttaaaatttatggttatgcccgggtttcaacttcaagtcaaaatttagaagaacaagttgctcaacttgtcgacgctggtgttaatcctcaaaatatttattctgaaaaatttacaggcacaacaactcaccgacctatttttgatctactattaaatacaatctcgaatggtgatactttggttattacaaagcttgatcgctttgccagaaacacacgcgaagccttaaatagtattgaaccactgctagaacaaaatattagtattaaagttctcaatctagggactattgaaaatacaccaatgggtaaaatgattgttcgaacccttctatcagtcgctgaaatggaacgcgatatgattgtagaacgtactcaagcaggaaaagagtattcaaaaaaacacaatctaaactatagagagggccgtccaagacgtaggattggcccccatgaacaagctatctatgagtattataaaaaccattcaatcaaagaaacaattgcagcctttaatacctcaaaagctactctttttagaataattcaccaaatccaaatagaaaatctctctacatcagaaaggtagttacagaatcaacatgaagctatttagaaaaaaatataagccctttcccacccctgaaaacacacccggctatactaataaaaaagtattcgacaatttcataactgaagcttccaaaattttgcaagataccaggcgcagccaaaccgttgataaaacatctatattcgttttactaaaacatttaactgatttagtcacattagagacttcattcactgcttatgatcacagtagtaccgaattttcagactatcttcttcagatttttgaggttaggaacgaacacaatgctaaaaaattatttgaagaaatataccttaatttagagttaaggtagattgcaaatttaatccgaatttttggacaaatttgtcagcataacctgatacggtgtttgccattcgagtattttaagcggtcgctggttaatttggagtaacgtcgtcgttaaatcttgagcgcttccacggatgacatatcaataatcttttttctactagatcgcattttaaattccccaattatatttttaatattattttatttagtatgaaatgtttttcacttaaaaaatgacctcactctatgttaaagcctacaatttcctaatctatattttttattttaccaaaactacattgtgtagtatcttttaaatagttcataattacaatgaattttatagttacttactctttaacatatctctcaatcctcataaccaagaatgttgatttttaagcagtcctttagaatccggacatacttttagatcattcatattcgtttaattaactattgaaccactagaaggcacctctctactcattttacacttttcatccccaaaaaagatccatataagtaataacataatcctcaaaaaccacaaaaataacggccccatttagggaccgttatttttttacttttaaatcagcggattttcatccaccgccggcaagtatctgccagccaatccggcaattaccgttagcaagccaacgctaatcaggccggccaagtgaatcaactgactggttgtgtcagacattgcgacgctgccactgatttgggcaatcacggccgttatgtcttgttgccgcattacggctaggcccatcaagccggtgatcaagataaattgcattaggatactaccgagatacgtattccgatatttaataattaaggtttgggccggcgtcgtgacgccggtgtaataagcgcgatgatttaaaagaatgctgttggcactgccaaagaaactaatcaataagatgcctaataaaattagatgtggcgtaatcatcaaccacgcaccagcaacaaatcctagtaattggacttttaagtctgataacttcgaaaagcgcccttgcacgctctttctaataacttgggctaaaatcatccctgcaccgtaagtcacgtaggcgcctatcatcaaactctgattttgaattgcgacaaaaatatagagcattaagaatgtttcaaacgccccgttaattaaagccgcaaccaaaagccaacccggcatcttcgttttagtgccgcgcgtgatgatcacccgcaagattagcgcgactaacccaatgacagcgactgtgattaataaccagacaaatttagcttcaaaaaggcgcagatatcttagcgcaaacgccatcgcggttgcccagacaaatagttccaagttattaagcgatttggtttgttcgacgaacaccgattcatcaagttgcttcacaaacggttcgaagcgttgcataccgataaagccaatcaatacaaatagcatgataacaataaagactaaccgatatgaaaaatgactagcgatggtcaacagaccaaccgttattaggctaaaagccaataacgttttaatttcagtgcccataaggtgccatttccaaaccacccgctcgtgataataaacgctctcataggttggcatgatcacactggcactggcgcccaggataaaggccgccatgtccgttaaatacagccaaggcgaaatagccaatagcaataaggcgccagcagctagcagcatactgatactagttattttaaatgaattctgcacgtggcctagactattcacgaataataagccagttttcaacgcggtatagaataagatatacggcatataagacgccactgactgcccgctatgaatcatggttaagccaattaaagggagaatttgaattaacttcgccaccgcaaagacaatcccttgtttaattttttcactggtcgctaattgttgcccatttgtcatcaatcatccctactttcattgattagatggtaccttatattgcgtctgatttcaaagaagtaccgttaaaagcctaaattgattgcacaaaaaaaacaccgtaagtcgtcgaaacgacttgcggtgttttgattaggattttattcccattccactgttgaaggtggcttgctcgtaatatcgtacacgatgcggttgacgtgatcgacttcattaacgattcgcacagaaaccttttgcaagatatcccatggaatccgtgagaagtcggctgtcatgccgtcgattgagttaacggcacgaatcccaactgtgtagtcgtatgtccggccatcacccatgacacccacactacggatgcctggtaagactgtgaagtattgccatacagttttatctaagccagcgagtgcaaattcttcacggagaattaaatcactatcacggacaatctttaatttgtcttcagtgacttcgccaaggacccgaatcccaaggccaggacctgggaatggttggcgccatacgagttcatatggcatgcctaatttttcgccaaggtcacgaacttcatctttaaataatgtatttaaaggttcaattaagctaaattgcatgtcttctggtaaaccaccaacgttatgatgtgatttgatggttgtcgcagtacttgtaccactttcaataatgtcagtgtataaagtcccttgcgctaagaagtcaatcccgtttaacttagttgcttcttcgtcgaacacttggataaattcgttaccaataatcttccgtttcttttctggatcagaaacgccagcgagtttactcatgaaacggtctttagcgtcaacttggatgatgttcaaaccaaatttaccgccaagactttccatcacttgttcaacttcgcctttacggagtaagccgtggtcaacaaagatgctgaccaattggtcgccgattgcgcggtgtaataacacaccaacgacagatgaatcaacgccacctgaaagaccaagaaggactttcttgtcaccgacttgttcacgaatcttagcgatttgcatgtcgatgaagtcgttcattgtccagttgtcttgggcaccacagacaccaaatgcaaagttcttcaaaatatcgttcccgaattcagtattccgcacttcggtatggaattgaatcccataaatccgacgttcacggttttcgatggcggtgaaaggtgtattatcactttcagcaaccgttacgaaaccttctggaatcgctgtgactttgtcgccatgactcatccacaccgtttgtttttcaggaaggcctttgaataagtcactgtctttgtcagtgactgtaatttcagccttaccatattcacgttctgttgatgcttcaacattcccgccgtttttaaaactgatcaactgcatcccgtaacaaatcccgagaattggaatccctagttcaaaaatttcggggtcaactgaaaaggcaccatcatcgtaaacactcattgggccaccagagaaaataattcccttaggggcgatcttcttgatttctgctgctgttgtcgtgttgggcaacaattcagagaaaatcccgaattcacggatacgacgtgtaatcaattgattatactgactaccgtaatctaatacgataatcttatcgaaatcttgcatgtccttttggaccaaacaactcactcctctttttaaaaagcaatttggtgtgaacaagtaacaccaaattgctagattcataacactaagtcaaactataatgtatctattttactgattaataatgaaaacgtcaatggattgacggccttcctgtgaaaaaactcattctattattaatatttacgtaggaataccttatcaatcacgtgatgtttcgttttatgcaaaatgacatcggcacgattacgcgttggtaagatatattcgtttaaattttgtaaattaatgtcacgccatacccgccgcgccatcttgaatgcactttgtcggtcactgatggcgtatggataatagtagttggtcggatcatctttggctaaatcgagtaatagatcgaaacgttcaaggaaccacttcttgattaagtcggcttgcgcatcgacataaattgaaaagtcgaagaagtcactgacgtaaatctgctcagttgatggcaactgtagtacgttaattccttcaacaattaaaatatctggatcgtcaatcacgtcgaactcgtcgggcacaatgtcgtaaatctgatgtgaatatttcggtgctttgactggtccaacattatttttgaccgcattcataaattgaattagatgcggcatatcataactttcgggaaagccttttttatcaagaattcctttttgtttcagcgtggctgtcggatataagaacccatcagtcgtaatcatttgaaccttcttatccgggtaggcccggctgagaaggagttgcaacaagcgcgccgtcgtactcttgccgaccgcgacgctcccagcgatgccaatgataaatggtgtcctatgtggcttaatctctagaaattcagatttttcggcctggcgcatctggtactgttcatagtgcatctgtatcagatgccgtaatggcaaataaatatcactcacatccgcaagtgaaatccgatcattcaatccccgaatctgttccagctccgtgtccgtgatgccagtatacgcgtcaccgcggccatgaaaaacccgccactcatcacgcgagatttcataatatttcatctcgttcttcatccgacaatcctccaatactaaacgcatccattttaacattaaaaacagagtgcgtcatcttgcgattatatttcgaggattagtctagtaccgtgaataagcgctatttagtagctcgccttttttctttatgaatgattatgatcagcatcccaaagttaagcaaactaatcaccgtccctattctctgaatcgtagttgttcgataataaacggtgattctaccagttcccttcaacgcaacttgtgttaacccagttcgtttattcatctgcattggtaatcgctgatgatggttgagttcggcaacgtaccctttgtaataaataaaggggacttcaacaactgctttttgatccgtcagtgtcctgaaatcaaactgataacggccccatgtatgccgtacatttgtaatttttattttatgcggctgatacttaacgacctgtcttttatgtcgcaaaattttctggtagtcggtttgagcaggtaaatactcatgtccggccccaatgtaataagggttgggcgtgttataggcagcattcgttctaaagcgccaactttggctttgaatactattcgtagagtagatgacatttcctgcgcccaacaacagaattagcagataaaagtagtacttattctttaataaatgacattcatccttagcaactaaataactcacaattgccgtaataatggcaaaaaaacgccacgggaactgaatcgtattgataattgtatgatccaacaaatgccaaggcataatcggcgtcgcagctatgaatagccccaacgcaatcccaattaaatcacggtcgtttttggaatagtaaaatagaccacacgcgatgcctaatccgagtagaatcgtgataccgacattcacagtattcgcatgaaaaacagcattcgttaatgaattaacaacaatgtctttaaagggtaatgtgcggtcagataaaaatgctaggggttgtgcggttacttgaaaagtcgtggttgccatttgttttccaaccgctaagaaataacgccctaataaaccgattgctaataagccagcagcaatgagatactttaaacttttattttggtagaatcccttgagatttaataaggtataaataatgatgacaatgcccatcatttcaacagaaatcatatgactataaccaatagttgccatccctattgataacagataccaataccggtgctcacctttttttaaccgcgttagcatcacaatcattaatgggaaaaaggtgagcgcgatcacttcaccaatggcttgccgattaactaaatctgcaaaacgataaatactaagaccgtacatcaaagagaatattaatgcttgcttcttattaaaatccgctaactttcctgaaatatatgtgattaaaaacgtactaaaattaatcgcaattgcaaatacaataaaactttctttgattgatagtcctactactctcagaatagctggtaagtagagaaaagcatctgggtaaaaaagacctgccgcatagcccattccgccgatgaaaaagtaactaattctcggaaaccactctccctgtttaatcgaaagtgccaaattctcaatgcggttcatgtggaaatgatagtcagaaccagacaggattttattgggctgtaaatagacgattgcaaccatcgcaatacttaatagtccaaaaaataatagggttactgttaaggcatgtcgcctgtaaaaatactttaatctttgcatcatacactcctcataaaaatactttagtatcgataattgccatcccagcatcagtctaagggggacgatcgaattataagtaagtataaataatgtaataatggacattatttatatataaactttaacgaatagaatcggtcaatgtacaatattttgtttggcaattaataagtaatccataagctaagaaagcgataagacgcaaaaaagcgggctaaataattattagcccgctttaaaatccattaaatttataaataaggtagattgcaaatttaatccgaatttttggacgaatttgtcagcataacctgatacggtgcattggtagaatattttcacaacaatgcctatatatcagtatttgtacccatgaacatccctttaaacattaaatttcaggcatgcaaaaaagcccccagagatgattaaatgaaatgcatttaatttcctctggaggcttttttcaaatggttgtttattcagtcaattacggcattaacgaattgcaactgcttctatctcaacaattgcgccagctggtagtttaccaacttgaacggcacttctagccggtgcgatatcaccgaagaatcgcgcatatacttcattgaattcgttaaagtcatccaaatcagttaaaaaacaattggttttcacaacgttttctagggataatcctgctgccgctaacacgtgttgcatattcgtgattacttgttttgtttgactcgctaagtccggtgccaattggccatcttttaatccgagttgccctgacataaagaccagttgatccgttgcaatcgcttggctgtatggtcccaatggttcaggtgctaagttagtgtagattttctctgtcatgctatcgtccccttcacattattaaatccgttttcattgtaatgcactttaccgcctttgacaacattctttgtgtttctttgcacaaaaaaagcgccgtctcaattaattgagacggcgcgctgggggtaagatttaggggagtgtcagctgaacgacacatttaagctttagatatattgaacaatttgcatcaagattgggacaacgaccacgaataagacggtacttgttgtgacaacgttcgttgcatattcaacgtcaccatgtgattgaccaactaagattggtaagacagccaaaccaggtgttgcagcttgaataatcaatgtgctttgttcgattgatggaattgaagttgtgttcttgaagaatagcatgatggcaatcatgatggctggtgccacaacgaaacggcctaataacgcaaggactgtatcgcggtcgaaatggattgatttcaaaccagcatcagctaagataatcccaatgtagatcaatgacattggtgttacgatgccaccgaccattgagaatgtcttatcaacaagttctggtaatggtaaaccagttaaaagataaattaatgcggctaagaaaccgattaatggtgaaggtaataatttacgccagttaaatttgcctttagcagcgcctttttctttgattggatcatcatttgagatgaagaagaccccgattgcccatgttgaaaccgtattggccacatagtagatcaagaagtaaggtaaactcttgtcaccgaatagtgccaagttcaatggtaacccaatgaagatggtattagcattgacgaacatattgataaatgtccctcgacgacctggccgaatccggaaagccttggttagtaaccatgccacgagataaccgagggcgaaactaattaagacgtagatcaagccgccagataaaccgaccaacttttcacgggttaagttatctaatactgagacgaaaattgataatggtaaagcgacattcatgattaaaaatgaaattgtgcctttaaaattatcatcgaatttttttgaactccgtagccaaaaccccaatgcaatgactaagacgatttcgacaacgcttgataatgatgttagaaatgctgccaactctttcacgctcctaccgatttatatttaaattatagtactttgtattctggttcccatttcatgtctgcgacggctttttgcacgtcagcaattggttctttattcaaaccttgatcaacagcgctttgagcaacagcgttcgcaaccgtttgtgagaagatatctagttttgtcacaggaggcaagacagctgcgccaggttctgttggatcaacaatgccacccaatgagtgagctgctttgctaatcatttcgtcatttaagactttcgcagtggaagcgattgtgcctaaaccaagccctggatagactaaagcgttgtttgcttgaccgatttcatatgtgacaccgttgtattcaacaggtgcagcaggaatcccagtcgctactaaagctttgccgtcagtccacttgattaagtctgcagcagctgcttcagctaatttcgttgggtttgacaatgggaaaataattgggcgttctgtgtgagcagccatttccttcacgattgattctgtaaaggtcccaggttgggttgaagtccccactaaaatggttgggtggattgctttgacagcagcttctaaagttgttaattcatcagcattcgcgaattcactccgtttgcgcgcaaatggtttttgttctggtgttaattctggatcatcatcaaacaatagcccttgcttgtcaaccatgtagaaacggctacgtgcttgttcttcagttaaaccttcttgtaacatttcttcgaagatgcgatgggtaatcccagcacccgcagtcccagcaccaaagctcatgtaaacttggtcggtcatcttgccaccagagatatttaaagcgcccataatcccagctaatgtgataatccctgtgccttggatatcatcattgaacgtcacgatttgatctttgtacttgttcaaaatattagcagcattgctccggccaaaatcttcaaagtgaagatacatattagggaataggtcttcagctgtttgcacgaattgatcgacgaaatcgtagtaacgatcgccgcgaacccgttcatgacggttgcctaagtataactcatcattgagtaagctttcacggttcgtcccagcatctaaaacaactggtaagacttgactaggatcaatcccggcagcagccgtataaaccattaatttaccaactgagatatccacaccttgtgtgccccagtcgccaatccctaagattccttcgccatcagtcacaacgattaatttaatttcgcgaccatcagcagcgtttgccaaggttgtcttcattgaatcaggatcgtcgattgataagaaagcagcgttttgggggttcacatataaagcactgtagttttcgattgtgtcagcgatcgttggatcgtaaaccactggcatgaattcagcaacatgttggctgaataatttaaagaacaacacacggttttcattaaaaattgacattaagaaaatccgttgttcaagcatgttggcttttgattgatattgggcataagcttgtttaacttgttcatcaatggtttgcacgtgaggtggtaacatccccgttaaaccaaattgtgcacgttcttcagcagtgaatgctgtacccttatttaaaaatggatcatttaaaatttgttgtgctttcatattaaaaatctccttttcttttatatcatgttggtcactatacacgcctcaacatttgatagtcaaaacttacatttatgataaaatagatttatatgaaacgtctaaactgcattaaacaggagtttttatgaagattaaagatttggcctattttgctgcgctaattaaattaaaaaattttacggcagtcgctgatcaattcaaggtcagtcaaccgacgatcacttacgcggtcaaacgccttgaagatgaattcgcgaccaaactcattcagcgcgatcaatcacaccaatcattgattattacccctagtggtgagcaactttatcaacatgccgcgcgaatattagcggagattgaactaacaaaggccgacatgctcaatctcaacgctactgatttgcgttttggcttgccaccaattatcggcacttactacttctcaaaattagcacaaaagctagccgctaacggcacgattcaacattttaagacagctgatgggggttccaaagaattgttggcttcattagaagccggtgaactagatgtcgcgcttcttggctctgcgacgccacttcaaaccgataccatcacagctaaagtcatcgaacgtcaccattttaagattgtagttgcacctgatagtcccttagcccagaaaccagcggtcgcctttcgtgatttagcccacgagaaatttattatgctcgcggaaggattcgtgcatcccgtggtcttcaagaacttatcggacgtcaatcaaatcaaacccgaaattatttaccgcaccaatgacgttagtgtcttaaaaagtatgattcacgaaaatgtcggcatcggttttctaactgaaaccagtattacgcctgctgatgacttagtggtacttgatttattggatgaaccacaaccaatcttttatatctcgttagcctatcgtaagacccagttcttctcaccaaaacaacaagctctcatttcgaatctcgaacaagcagcgcgagactaccgtcttgaacattaaaaaagtggtggcgacaaaattaatttttgtcgccaccactttttaagtatgttttaccataaaaacgctaagacagtttgattgactgcatgattttcgtgtaattgactatgctgcgcttttttaccagtaaacttcttttcttgataggtcttcgcaccaggcgtcaccaaataccgcaacgactgtgacgatgcattactaacacgtccgtcagaatgcgtcccatcgcctaaatccccatagatattcaacaccgtaatcgatttagcagggagctggttacgcagtcccatcagttgccgataagtcgcgttcattttttgtggttggccatcctttttaacctggttttgattaggctgatcatccatcccgataatcccatcaaaatgacccgcaatattcaccatcttcgccatacggggtaactgtttatcaatcgcatggttcaataaataataaacggccgtcaagttgcccatcgaatgagccaccacgttgaatcgtttgaagctgtgctgccgattaaccgcgactaagacgtttttaaaccactcaccatcttgttgatagttaggattgcgattatcttcgaaaacaacttgcacgattggtcgtgtcgttttagctaaccaacgcccctgtaaatcaactgaaccatccttacgaacggttgcagtgaggacctgtgtcgcattcttttgttcgcgagcagctttgatcatgctatcagtcgaacgagccgaaccgccataaccatgcaaataaaaagtgggctgttcattttctgtttgcttgacttgctgcgctttttgcgtcgttgcattccctaaaagccaccatccactgccaattaaaactcctaaaccaatgatgattattatccatttagaacgtcgcatgcgcccgaatcccttcgcttttctaattacgcctatggtaccataccattcataaagggtgtcaattaatttagcgtaagttgatcaaaaaaataacccgggtcaattgacccgggttattttgctattaatggtaataaattgtaattaatgttaccagcccaaatatgattcctgggacatttgaaatgatgattggccaatctttatgtggtttaaaccaaccgtaactaaaccacaaagtcgcattaaccatcgcaacgcttggttgaatcgccgacacagggtgcccagctaaattagccataatttgttggatatatgatacgtacatcaagaaacatgtcccaactgctatctttccaagccaagccagttgattgcgatcactatgaaccgtcgctgttttttgatacctaatcgttacatcttttgttttcatcttctacctcgtcactagtcttcgacagttatagtggctacgcgatcaattaaatgtgtcccatattgaaaagcattggcataaattgttagcgtcccgtctaaagcctgctcaaactcaaacaacgcttgattatctaaccaagtgatgctagttacgcgttgcggatattgattaaacactatcttccgcgccttttcgccacccagcacaacattactattacctatattacctaaaccatagacaaacagatagtttcctttgataaaatcggttgtctcgccacttgccaagtaggtctgattttcataatgatttgtcgcataaattgcttctccataaactgacatccattgtccgacaatcttcaataacgactgtgaaaatgctggaatggcaccgtcaaattcaagcccggtattaattaataaattagcaccgacttttctggaattacaaatttgatcaataagttgcttcggtgacacatagttaatgtcatttttagcaaccccccaatgcttattaatcgaaaaagaaaaggatgacaacaacccttattttgtaagcgttgattggttaatgaaagtaagttcttttaaggacaataattaatttcctatgtaaggctctgatgtcaagccaacaccagaatatcgccgttttgaatccaattcaagcctgcatcaatgtgtacgttgaaattcttagtcctttttacaatcgtttaagtattgatgttcgccaacgtcgtaatcacaagcagctaattgtctctgatttacagattttagcgttgatgatgtttcaaatcgaacgccgaactgtgtcacaacgtcaatttcaccgcgaaatggttacgtatgggattaaaattcctgaatgctcacgttttagccgtcgttgtcatgatctcgctaaggacatgaagacaattcgaaacgatatgcttcaacgttggacgcgtcatactgcatattccgtgattgatagtgcgcctatattgttgtgtgcaccagttagaaatatgcaggctaaggtttttcacgatgtcgcaaacattggcttcaacgctactaaacacctgcacttttacgggttcaagtttcattgtgtcatgacgaatgaaggctatgtggcgggctatgaagtaaccaaagcgtccatacatgatgttagagtcgcagaagaattgttagaacaagctagttcatcgcgagttttaactgacgttggttatctaagtaaagacttgaaacagcaactttcaacgaaaggtatcaatatttggacgccattgcgtaagaacatgaagcaaccggtgaacgttgatataacgctgttaaagagacagcgccgacatattgaaacgatgttcaataacttgaatacggttgccgcatttgaacatccgcatgttcgcacagcggttgggctcgaagccctaattgagatgatgcttttatggcacaccatcaaggttcacgacaatctcatgcatcacatcagcgggttgaaaatcgtgtagataacaggaacgttaataaactagcaccacgcgtagttaagtattaaattttgtgatctaatagaatttgtggagtaataaatagtttgggtgaagtgaaatggacatagaaaaaatcattgactacatgaatgataatgttcgatggggaagcgaaataaaacgaagcgcaataaatgaacttattgggcaatcccaaaatgatcttaatttttcatatcgaatatataaagaggcgtctgatatgaatttggtgatcattgaagatgagccttcgtctttaaagaatgttatacacaatgcgggtttatcttggcaggatgacatgaaaaatttgcttcaaggattacctgaagaatttacattatcggatgtatatttatttgaccgtgatttaggacagatacatagtgaaaatcaaaatgttagggctaagattagacaagttttgcagcaattgagagacaaaggagaaataacatttgtctctgatggtgtctatcgaaaggccaaaattcaaagcaaatcagatagcgggcacttgcttgataatgtgatttctgaagatcccgattattttgacgatttcgatgactttgaagaccttgatgatgttttgagttcagaaaaatttgatgatcagtataagaatgtcgcagaaacacctgatttttctaataattcaaattacattgacgaatatcaaaaatcagacagcacacgggcgctagactcattgatgagggcaaatgagaaattagtggcaagtatagccaaaaaatatacaggacaaacaacggctagttatgactttgatgacatgattgtagaaggtatgctggggctgaagagggctgcagaaaaattcgattcatcattgggatatgaattttcgacttatgcaacctggtggattagacaagctattactcgtggtatagccgatcagtcaacaatagtcagactgcctgttcacatgagagaagtgcttaataaagagcgcaatgccgaaaataagttattcaaagacctatcacgaccggcaactgatgatgaggttgcggcgtttatgaacattgatgtggataaggttgttggttataaaaaagttcaatatagatttggaagcaatcttgtgtccttggatttaccggttggttctgccgaaagtgatacaactttgggtgagctaattccagaggatgatgtaaaaagcgaatttgacatagtgtcagataatgagcttagtaagaggttgaacgagctactgcttgaattgacagatcgagagcgtgaagtgataataatgcgatttggattagaaaactcgagtattcatactttggaacaggtaggtcaaaaaatgggagtgactcgagaaagaataagacagattgaagggaaggcgcttcgacgattaagaaatccagtaaatgcaaaacaaattaaagattggattgaagtggaagagtagcgtggagagaatggattattatggatcttaataacagaattgaaagtatcatcagtgaaaataatttagacaccccattggtaatattggttggatttggtcaggaaagttttgacaattggttcattactcctattgatcaaaagctcgatctaattgatttggatgatagaaaagctaaggtatttagtgaagccatggcaagtatggctaaaggtttgccttactatatagttcgacctgaagaatttagtttaatatcagaacttgtgggtgttatgtatcctaaggataaagttgtcattaagaatgatttgttcgatactaagtacccttacgatgattctttatcagatgttcagaaagcatatgaaatgctttatttgagtgaagatacagaaatagaaggaacagacaaacttaaggttgaacgaattaataccttttacggcgggatagactattctaaaaagtcaaacgaatattatatatcatataaaacggatttgtgggatgggtacccggtatttgatatcagtggattggaaaatgacgttgttcctcagttggtttctaatccaacggccgatattacgatggctctggatgaagaagagacggcgtttttggattttgaaattgaacaagattattctaactctgttaactttgtgattgaatcgttggatcagatcccgcatcgatatattcaccgtatttctgtaatgaaggagttacatccggactgggaagtttacttttctacacaatcaataaaacgaaatgacattgagagacttaatgaatatcgacagatacttaaaaaagtttgggggtatgatgacttcagagacctagaaatgtatgccacgattgagaagagagataagaagttaattaaaatatcacaagctcaaattatagatgatatcgtacaacaggctgagcaggcccgagggggtaatgactatcgtgatgtgtatatcactgcatcaactggggcaggaaaatcagtgatgtttcaggtaccaacactatacttaactgaaaaatatcaagatgataagccattagtgctagtaatatcgccgcttattggtttgatgaatgaccaagtcgatagcatgaaagcaaaaggcgttgaaaatgcagagacaataaatggtaatactcctccgtatgaaaaacagaacattttacaaaaagtagcagatggaactgttgacatgctgtacctctcacctgaaacgcttcaggcaagaggtgatattaagatgttaattggcgatcgaaaaattggaatggtgattgtcgatgaagcccacattgtaacaacgtggggaaaatcattcagagcggactattggtatttgggtatatatcttcaaaaactgcgtaaagaatttcagtttccgattgttacatttactgctactgctatttatggtggtagagaagacatgtacatggatacacgcaatagtctgaatatggtccggccgattgcttatttcggtgtggttcgacgaaacgatatttttatgaaggtatcatcatccgccgacgataaggatagagactatcgtaagacgaagaacgttcttgccttaaagtatctgcaaaatgcttcaaagagaggacaaaaatcgttaatgtactttcctacgatatctttgttgaacggattttaccaattcgtcgaaacaaatgcacctagtatagccaaggttactggccgatattacggtacgctcactaaggaagagaaggatgccgttttagatgagtataaaactggagaaattcaatttgttctcgcaacaaaagcttttggaatgggaattgatattccagacattacaaatgtttatcactttaatccaaccgggaatgttgttgattacattcaggaaataggacgagttgcaagaaatcatcaactcgtgcccaggggatttggcgttttggattttctgcctcaagatttgaacgcggtaaagaaattgcagggaatgagcgcgattagaaaaaatcaaattcaagccgtgatgcaaaaagttctagatatataccgggcaaaaggaaataatcgtaatattgtcgtgaatgctgatgactttaagtatatcttctcggataacttggacgatgataacaacaatttagacaacaaagttaaaacggtattgctgatgattgaaaaagatttttcctcaagccgtaagctgggttactctccattcgttgcaagaccgagaagtatttttggtaaggaattaatcttagctactaaagaggttcagaacacgcttgaaagttcttcgttgcgtaattatgtggaatacgtcgcgtcactccatggaggaaactatgcttctgtattgtccatagatctttcaggtatttgggaggaccattataagaaaatgtcgtttcctgagtttaagtacaaattaaacacacctgatgagcgtgaaaaattacgccattcgaagttgtttagtctgtttgtgttcgcgagcggtgttcaatatgagttcgatgatcaaaatagtacaaaacaggctaagtataaatcaattatggaaacttacttacgatttttagatactaaacaacgaactaacaaacaatttgatgctaaagagttaggcgaattcgttagaaacaacttacgtattagcgacccctttaaagcaagaagcttagcgcaagttcttatcaatgcaacttttgagtatcaaaaactcaaagatgtgaaagttttgaaagagcgagttgtcggggagaagactcgctttggggttatcagatctggagacattttttatgattttgttagtggagttactaataggatatatcatcccaagtacagttactttgaggatgaaggctcaatgaatatattccactataggaattctgaagaattttctgaagaaatgatagttttgggaattggagaagcttttgaattaggaagctacacaactctcggcggatataatcctcaaatatacattcgaattaattcggtttatccagtagaacaggccattaaagcagatcaaaaatacagaaactttatactagaagatgtaatgttgaagcatcgaattggcgtacttatgcagcgtttcttatttactcacaaagaaaatggcaattctgggaaagaactcgtagaaaaatatacggattggttctgggatcaaatagaagattattttatgggaaagttacctgaagaagttgaaactgagctttttcaaaaaaagtctagagcagatgaatagtgttagttgcagcgaaccattgtggttcgctttttttgtccaaggttagttaagatgaaatttttcatacaatactgctaaaatgaatacaaacatatgacgtgagaggtattcagtatgaagaaacgaatagcagttgttggggcggcaattatcgaaaataataaattgttggcagctaagcgttcagagggacgatcataatatataaatttaattagatcacattatttacaagttcgctacgaaaaagcaaacatagtcataatatggacgattttatgtggtgaaaataacccctagcgcgtaatacattgatagttttttgtagcgccataatcacacttctttttatctggcaaattctataattaatccgaacagaaattaaaaagcccaaagcaatcacttacaatggtagtagctaattccaaccaatatagggagtaattactttggtttaaaaagtttaacatatagggaaaaatttatcttgtgctacgacttaaaaagaaagaaactactgctacaacaactattgcgcctataattgacggaataatggccataccagctatatttggcccccaactgcctaaaatagcttcaccaatggatgagccaactaagccagcgataatattgctaatccagcccatagctgcgccccgattagtgatggcaccagcaattgcgccaataacagcaccaacaattaaaacccataaccaatgcataaaattcacttcctcttttttgaacaaacgttctataatgattacaaggataactataaccttatcaggggtgtgatgcaaggaaaccatacgagcaaagctgttgaacaaattcacaatatttcctgtgcatgctatttatttcataaatgtttcaataataaaataggtatgtaaaacaattatttgtgtttcatatctccgatcaagtggagtgtccattaaccaatttttgagattgctagtgttgggttgactgggtgtcaacttatattattagctacaccaatatgtattttcggatagatcagttaactcagcattaatcattttttcttaaataaaataaaaaagtgggtaaatgaaaaatgatcatgatgtatacacagtcagggtgtcattcttgtatgacatctcgtcgatggtttaataaacacggaatcagattccaagaaaaaaactttagtaaacaccctccaaaactataagtaaagaaaatagggtccctattttcttttaataccgtatttcacacggtatcgaataaaggtcgtccgtttaatacctgtatttcgggacacatcaatgtcactcatgccagctcgataaagcttaaaagcatgtagtaagcggggatcatcttcggtatattggggtttgcgcccatgatatttcccctgatgtttggccaggaaaatcccctgttgttgacgctcaataatccgcttccgttcactttcggcctgatacttatacagttcaatgattaagttagtcatcagttgacgcaagttaggatccgcaatccccgtcatggacggcaaattcaacacatctagggtggcacctttgttctgaatggtgttcataatcttagttaagtcctggttgtttcggcccaagcggtctaattcagtaaccaggacaatatcgccttcacggatataggccagcattttttgcagttcaggtcgcttggtgttagccccacttaacttatctgaaaatagtttatcaacgccttttaaagccgctaactgtcgatctaaatgttgctccttggaactcacgcgcgcataaccgattttagccatttccgtttctccttttggacagttctaatgaacatttataaatcctagtatatcacagaaacgaaaatgaccactagggtataccctagtggccgtttttgatccattatcaatggctttttaaattagggcctagtacttttggaatggaaataatttccaacaccaaaaattctagacccgatattattaccctaaaaacgagtacccggtaatactgggtactcgtttttttgatcctttggatgatcaagcagggacgcgcggaaactcatttcgtaatggtaagtcagctaaataataggtcataatcagtgaaccaaggtcgggactatgctacgataaatttaggttgaatcagcgaggtgagtggatggagtggcaacaattattaatggaaaatacggcgttgatcaatgcacaggttgttcagattgggctggaacgggaaggccagcgggtaacggtgaccggtcatttggcggatacggcattatcaccaacacttatcagcgagttgtccggcctgcaacgggactttgcggagacacagttggagttagtcacccaaccgcaagcaagtgcggttgctgcgttgcacgccttaacgatgctcacacaacaagtccggcaaaggcttctgcctgaactgatttggccgctaagcatgccgcccacacttccacgagaagaccgggatattccaattgctaagttggatgcggtcgctgtcgcctatcgacaaggacttgctcaccgctatggccgacgacgtcaaatgttgtcaggtgttcactgtaaatgtaagcttagcggctagtctgatgatgggattgtatcaggcccagacagatagtcgtgatttcactacctttcaaaatcgctgttacctgcacattgcgcagaattatttgcactatcgctggctactgacgtatctttatggctgctcaccacgctgctggccacagtctggtcttacgccaccagcccagcccgttcgaagcttacgcaacagttctagcgggtataccaatcggccgggtgttacggtctcgtacgcgtcgttaaatgactattgtcaaacactgcaagcggccgttgataatggaaaattaagtgcgaccaaggaattttacggtcaggttcgattgcgtcatgccggtggtcattcacaactatgtcaggatgggattcaatacttggaattacgtaacttagacctgaacccatgggccggtgcgggcgttgatctgtcccaactgacctgcttaacgtggttcgttttactgatgctctggttaccagtgccagctagtacggataattggattcaggcgggtcagcgcgccaacgaacaagttgccatcgaaacccccatgcaagtgactcgacagctaactgaaggcgaacaactagctgacgcgctacaaactatggctaccagtttacatcaaccacacgcgttgcaagtcgcccaacatatcttaactagtctgcacgacccggccaacacactcgcggcccgctgggaacaacaaacaaacgattcgctcgaacgtgcaacccaacttgcactccagctggctgcgacaccacattttaatgcttgaatatactgaaatcggcgtacacacgtgttggcacgttaggacgcacatcggcggacgaataacaaaccaactaataagcacgtttaaaccatgactaacgtcaaataacgcgtcgcatgtcaagaatgataatttttgagacgattatttgcgcggaaactgaaattgcgttaaatttgagctatactattactaccacaaatattagaaaaccattagttatcgaaggggcgcgcgttttataattaagttagccacgcccaaaaggtcaccatttatcggaaatcgaacgcggtcaaatcgccgcttggcacattgaaggatgctcagcacggcaaatagcgattcgattaggcgtctgccaccagaccgtcaataatgagctcaagcgtggtcgagtcacgcaagttaaacgcgttaataatcagaaacactactttgaaatttacagccctgaagccgctcagaatcgctatgaaataaagcggcaaaactgtggacgtccattaaaatttatccaagtgacggccttcttagcctactttgatgataagttctgccatgagggctggtcgccggacgctgctgttggttatgcccgtaagcaccggttatttaagccggccaaaatggtctgtacgaagactttgtacaactatatcgatgcgcaactattggagatccgtaaccttgatctgctggaaaaaacaaaacgccggacgacccagcaccactcgcaccaacatcagcgcctactcggtcgtagtattgaagaacggccaaagcgagtagaaacgcgccacgagtttggtcattttgagatcgatactgtcattggcaaacgtgctggtagcgagagtgtcctattaacgtttaccgaacgtaaaacgcgctatgagattgtccgcttgatcgagggtaaagacgctgaatctgtggcttatgccatgcaaaatattacggctgaattcggtgacgttatgcggacagttacggcggataacggaacagagttcaccacgctaacggctgcgcttgagggtgttgccgagacttattatgcccacccttatagctcggccgaacgcgccactaatgaggtccacaatcgtatactcagacgttactttcctaaggggcaatcactcgatctagctacacccagtctggcccgtcaagctgaatcttggctcaaccatctcccgcgccgcttacttaagttctgtacaccagctgaaatatttcgaaaggaattatcacgtgcgcgcaaaggccgcgccgcctaatcctgatccacctggaactcccatgagccctttcgtctgtgtgctttatcggcactggctaacttactattgcaatttgcgtaagcctaaaaaataaggaagttggcctgattggtcaacttccttattttttatcagctattgatcggcaacttttttcaataatcgtttcatctccgtgatctcttcacgttgcgttttagcgatcttctgtgcgagggctttgacttccggatcgctgagttgcgcgcgttcactggttagaatcgcggtcgagtgatgggggatcatttcttgcatccaagctgcatcgtgcacggtcgcttggctacgaactagataaagcgagccagcaaatatcaccgcactaccaagtaggatcaggcggttcaaacgtttattctggtacattgaccacatgaataacagcattacaatggccatggtggcgcccataattagcgccatatacagtcgcgtttggcttagaaaaatatgatctaattggaacacattaaggtacattaacccatacataataactgtagagacaagaatcatcagtaaaaatttcgtgtattgtttcatgacgtcctcctcgctttcgctggctttattttgactataggtagattacaaatttaatccgaattatttgcaatttaaaacgtagtctccaatattgtatttagtatgcctcatgggaattcactctgatttatgtggcccccttcaaattggaatttgtaatctaacataaacggcttattaatcacgcctaaccggctcttcaggttgtttttcagggtatattttttctggatttatttggggattttcaggcggagtctttactggaaatctttgtggtaattgctttttaggcttttctattggtatatgaggagtaattttgtttgggtgtttttccaaaagtgatatcattagctatgcctccttaaattcttcttgaatggagtgtcgtcttttaaatcagagcgatgttgataccatttttccgcttgttccgtagcaattgaaatggcccgcttatcgtcataatttttttctttaagcgcatttgcgatctcaatagctttttttcgaaccacttttttcaaatttttcattgatggtgggtaattttgttcattccaaggcatttcaataacctccattatttacaattaagtaaattttttagtcaattaatcgtaaagttaaagtccaagttaatctcttaagtagcaatatcaatattccgacaccacttcttagcataagtttatttgttatatattaaataagattacagcatgttggtaagcgttgtcaaaaaagttgctttagtttcaaccgatagtcactagactcatattttaactaagaaatagtatcataaacctacttttaaatcttatgaaaaatataattggcagtataaattgagcctttaccttgctgctggcattattcccgtggctgataaaatgtctaatgtgggaaagtggctcaaatttaatggttgcgggattacaataagtgatcttgaagatctccacggagaacttttaacgatttcccgttctaaatatgaaacattgcaaaatgaagttaagcttcagcaacatcgggttagagaaggatactatacacagaaattggtttcatccatagaaaagagcttggaaataagtgtttaatgaatactacaactagcgcttttagtttttttttaatttcaccgtatcaggttatgctgacaaatttgtccgaaaattcggattaaatttgcaatctacccatatgcattgtaagtatgttctgaaacaaggttttcttcttcagtgaagacattgtattcagcaaatttgctttgtaggtctttgtatggaattaatttgttatcttcatcaagtaagatagcacgaccataaccaccgtaagcagcatcaacgtggaagtagaagtagatgccttctttaacaagtttgttacgtaattcagcaatttcgttgatgccgtcaacagcaccttcttcagttgagccaacaacgccgacaaccccaagaattggtgtttctgtgcttgctaattcacgaacgattttttctaattcattgatatccatacggtaatttgaatcaactggtactgggattacttgatccaaaccgataccgataatatcagcggcttttaaccatgaataatgttttgtttgtggaactaaccatttacctaacttgtcaagatctttaccaccacgagctgatttagctttgatttcatcaatcttgtcgccgttagcttcaactaagtccatgatttctttagttgacatgtttgataattcccagtctgtcttgcctgctacaatagtaggatcaacagccttcattgcaaatggaagtgacttgatgttacgtgcataccataaaccttccaagttagctaatgaaccgtcagctacgatgtggccccaaccatttgtgtaacccatcaatgttgcaaattctaaaccaacttcttcttccatttgtgaagttgctggtgatgattcatacgcaacgttattaccattccataacattgcatagttatatgccaaaatggctggtattaatgtttctgagttcatatgaccccagtaacgaccagcattatgtcaaggaactgattgtgaacgtaaacgtgctgaaagttcgtctaaaacgtctttcatgttgttaaccgttccttggaattcaggtgatgtttgttgttcagctgaaatcattggtttgtcttgtggcatgtagttttgacgccatccaagatgttcgtcaactaacttacctaacaaatctttgtaaagttgaccattttcagctttatcaccgataaatagagcagataaatctgtatcttttgcactaaaactattgttactcataacaaaaaatcctcctaaattgtagatatagtataaccccaatcaatagaatacgctcattgtccataaaagcaaacacatgaaagcgattccgattttttagagtacgaaaaatagccgtcaaacaacgtttgacagctacctttgcagttgtattttggggttatactatatgatctacattcacgaagaacccagtaacattcagtatagatacaaaagccttcatttaatttttggaacgtctctagtcagtaacacgtgctaagaagtaattcttcttcccacggcgaataatcacaaacttgccatcaaagctagtcatcgggtcaatcatcgcatcagtttcttggatacggtcaccgttaattgtaatggcaccattttgaacatcttcacgtgcttgacgttttgaagattcaatacctgtatccactaagaagtcaacaatgtttttagcttctttactaatttcaactgatggtgctttaccaaaagcttgttctgcttcaacaacatctaaagctttgatattaccttcaaaaagtaattcagtaatatgttccgcttcatctaatgcttcttgaccgtgaacaaaacgtgtcacttcttgtgctaaacgtttttgtgcttcacgtttttcaggttctgttgcaactttttgtgccaattcttcaatttcgtcttcttctaagaatgtgaagaatttaaggtatttaataacatcacgatcatcttgatttacccagaattggtagaattcgtatggtgaagtcttttcagcgtcaagccagattgcaccacctgctgtcttaccaaacttagttccgtcagctttcaacattaatggaattgttaaaccgtatacgggttcgtcgctaccttcaagtttatgaatcatatcaatccctgaagtaatattgccccattgatcagccccaccaatttgcagttggatgttatgttcatcatgtaagtgtttgaaatcaattgattgtagaatttggtatgtgaattcagtaaatgaaatccccacttccaaacgactagcaacaatatctttagctaacattgtattgatgttgaaattcttaccgtaatctcttaaaaagtccaacaatgagatttttgataaccaatcgtagttattaacaaaagtaacattggcatctttaccaaataatttccgcatttggtttgataaagcttcaacatttttttgaaccttttccattgtttgtaactggcgttctgaattacgaccacttggatcaccaattgatcctgtcccaccaccgattaagatgtatgggtgatgtccagctaattggaatcgcttcatcatcatgaatggaatcaaatgaccgatgtgtaaactatcaccagttggatcagccccacagtataaagaaatcttgttgttttctactaattcacgcaatccttcagcatctgtttgttggttaatcgcatcacgccatgttaattcatcaataatattttttctcatcaaaatttcctcctaaattaaaaaagtcccagcaatctttaataaaataaagattactgggacgaaatgtcattttttcgcggtaccacccgtgttatattttgaaagtgcactttcaaaatatcactctagattttaacgtaaattcaacgtacgatttgataaaacaaaaagtgtaattcgacttagaaacatatgtcaggtctcaccaaatcccgactctctgtaatagtggttactaattctactgcgcttttcaatcgctttattaacttatgtgcttatcatagttcacatgataaatgaagtcaacacttttatgctatttttttataaacatgaacgattttattctaatttaaatttaattaaattaaattagaatagtcgtatttaattcctctaaattaaagttttacaacattcgcagcttgtggtccacgtgtgccttcaacgatgtcgaattcgaccgcttggccttcttctaatgacttgaagccttcgtcttggattgcactgaaatgtacaaagatatcgtcttgaccttctgctgagataaagccgaaacctttttcattgttaaaccattttactgttcctttttccatgatgttactccttttaaatacacaattattatctagccaccagaatcggtcatctaaacaagtcaattatacgcgattttgtaaccgcatgcaagcgtaaaataaattaattgagtttatatcgggtccgccgttgatattgttcgccaggatgcaaaacaatattaccaaactcggtatgatggatggcatctggcatcatttgggcttcaatcgccactgcttggtggggttgaattgcctgatttgttaagtttggttcgtccccgaagccattggcggtataaataacgattgcattcccttctgtatcaattgtgatcgagcggccactttcgggatcgcgtaaaatcgcatccgatttacccggcgtttgattcaacaggaatggatgatcaaaaccaccgaccaatttagtttgcgtattttcactatcaaaagcggcttgcaaagctcgcggttgacgtaaatcaaagacagagcccgcaactgggactaattccccggttggtaagccgtctggttgaatggcaccaaaacggtcactatcgatttgcaatgtgtgttggccaacaaattgatcaaagtcccccgtcaaattcagatagacatggcatgttgggttaaacaacgtggttttatcagtcgttgcttgatagtcaattagccattcattggcctcatttagcgtatacgtcgtggtcaccgctaaattaccggggaatccattttcaccatctggactcgttaacatgaaaacgacactaatcgcatcatctttttcaaccactgatgattgccagatttgcgattcaaaactattggggccaccatgattcgtgttggcgccattattaatcggtgcttgataatcatgaccatcgagtgtaaaagcaccttgaccgatgcggccagctacgcgtcccactgtcgcaccaaaataagcttgttgctttacaaaatccgctagggtgtcatagccaatcacaacattggccatctgaccactttgatccggcatcaccaagtgagtaatcgttgcgccgtattctgtcacggctaattgatacccctgacgattctctagccaatactgccaaaccgtttgaccatttatttctccaaatgcttctcgccaatacttcatgaatgtccctccttataggttaaacatgttgcgtaaatttaataaatgctgcctgaccttgttcgttgcatttgaaaacaccagcgtcttctagaacgcgcatgaacactttgccgacttcagtccgcactaattccgttacgttatctgatgtaatcgatgtgttagcggctttaatcgtatctgcccattcttgatggtaagcggccatctggtttggttgatcgcagagatagtgttcaacctcagccatttcatctttgagtcgtggtggcaaaattgctaagcccatcacttcgattaaaccaatattttcttttttaatatgttgcacatctgcatgtggatgataaattccatctggatgttctgcagacgtttgattgtcgcgtagtaccaaatcaatttcgaattgaccgtctcgcatccgcgcaatcggcgtaatcgtatgatgtggtgtgccgtcttctgagtgggctaagatttggacacttggatcgctgtaattttgccaactagttaaaatttgtgcagcgagtgtttccaaatgcgttgcattcgcactcgtcaaacgaatgactgacattggccacttcacaattcccgcctgaatatcattatacccgttaaaatgtagtggtgtctcgattggcgccttagccattggaaaatcgtgacgccccccttgataatgttcatgggttaagatcgaaccaccgacaatcggtaaatcagcgttactcccagcgaaatagccggggaactgcttcacaatctgtaataaatttttgaaggtcgtttcattaatcaccattggttcgtgttgaccatcaaggaaaatcgaatgctcattaaaataagcatatggtgaatattggaagccccaagtctgacctgccaattcaaaacgaatgatgcgatgattacgccgtgctgggaaatctaaacgccccgtatacccctcattttccagacataattgacatttggggtagccggtttgtttcatcgttttggctaacgcaatttgtttcggatccttttccggcttcgataaattaatcgtgatttctaagtcgccatagtgcgtcggcacttgataagcgatatttttcgcgattgcggccactttaacgtagtcgttggcccgacttaattcataaaagtcggcaagtgcttgttggggatcactctcgtattgatgccaaaaatggcggttcaccgcacttggtaatggcgtcaccaaatccatcaacttcgcccctaaaatatcttgttctgccgctaaattctcaatccggctattcgcaactgcaagacgcaacaatgcgtcctttaatccgatgagactttgatcagtcaccgcaacgttactgtcctcttcaccaacaaggtctaagacgagattaaataagtactgttggtcttctgctttataaagtgtgtcttgaaagataatcactttttcaataaatgtttgaatcaattctcttgcttgcatatgctttcctctaccgatctgcgtatcctgctgtaaaagcgcgcttgtgaattaatggcggcttgatggccggtgacgagactgtcgacaacggccacatccgtgccgcgttgaattaattgatcaacggtgtgtgagccgatgtagccggcgccacctaatactaaaactgtcatcttatcattctcctcttcagttgactgattaacctaattttttagcgccatcggcaatttctgccacgtagaaacttggcgcatacccaatcttgtctgtataaactttagcaacattcgtttcaaagttgtcgacttggtctttagcaacaattgcaatcgcacaacccccaaagcccgcaccagtcatccgagcgcctaagacccctggttgttgccaagcggtttgaacgagtgtgtctaattcgatcccagtcacttcataatcaaattgcaatgacacgtgtgacgcattaactaatttgccgaaacgttcaaggtcgttgttcttcagggcttcgcgggccttcattgtccgttggttttcagaaaccgcatggcgtgcacgtttcaacaagttttcatcttgtagcatgtatgtttgtaaatcaaaggtttcgttatctaaatcgcccaatgattgaatatcattcttcgtttgtaaaatggctaaggccttttcacattcactgcgacgttcattatattttgaatcggccaattcacggcgtttattagtgttcatgataataatcacgttgtcttgcaaatcaattgggactaaatcgtaatccaatgtgttcgtgtctagtaagatggcatggttggctttgcccattccaacggcaaattgatccatgatgcctgagttaacgccgataaatttattttcaaccatgacaccggttttaacaaggtcgacacggttaatttctaaattgaattggtcttctagaatcacacccattaataattcaattgatgcggatgatgataagccagcgccgtttggaatattgccttttaaataaatgtccaaaccactgtcgattgtgtaaccttgttcttgaaggtaaacaatcatcccttttggatagttcgcccagttgtgggccttttgataagataagtcgctgaggtcaaatgaaatgacacccgcatcttcaaagttcccagataataaattgattgtttggtcatcacgtttagcaacgactgcatatgtgcccaatgtaatcgcggttgggaaaacatgcccgccgttgtaatcagtatgttcaccaatcaagttaatccgacctggtgcgaagtagctcgcttccggtgctttgtggaatgcgttttcgaatgcggtatttaattctgtcatgttcatagtaaattcctcctttattaatcgctttcattttactaaacatttactaaaaaatcaatcttttttgttaactatcgctttcttttcattggttatgctaaactaagtaatagtaaacattgaattgagaggtgcaccttggcaacgatcaaagatattgctcaactcgctaacgtttcgaatgcaaccgtttcgcgggtcctaaattatgatcaaacactttcggttggcgatgagacccggcaacggattttcgaagccgccgaaagtttaaactatcgtaaaaacacgcgcaaaatgaaccagcaacgcggacgcattgcgattgttgaatggtataccgctaaagaagaattggaagatctatactacctctccatccgacttggcgttgaaaagaaactcaaagaacttggttatgacgtaacacgcttctttcaaaacgatccatttgatacgctccatgatgctacgggtgctgtggtaattggtaagtacagccctgcgcagattaagcgcctaaaaaaactcaaccacaacctcgtcttcgtcgacatgaacacgctcgattgtgaagtcagctgtgtgatgaccgacttcaaaacaccaattaaatccgtaatcaatcattttacaaccgccggcttaactaaaattggtatgttaactggtcaagagagcactgctgataatactaaattgggaccggatccccgttttattcattttaagacgttactcaaagctcaaaaaaactatcaccccgattggattttaaccggtgactttacacccgaatcaggttaccaactcatgatacaattattacaagaccaaagttccgatttaccagaagccctcttcatcgccaatgatgcaatggcagtcggcgctttacgcgccttacatgaatcaggcatcaaagtccctgaacaactcagcctgattagtttcaacgatacctcaatttgccaatacacgttccctactttaagttccgttaaagtttacactgaacaaatgggccaatcagctgccgagttattggttaaacaactcgccgctagcgaaattatcccccaagtcattacgattggcacgacgctgacactacgcaatagttcaaaataataccttcagcccaccgatgatcaattcatctcgtgggtttttatcttgtctcaaatcaattttcattaataggagtatctcttttgaaaacgaaaaaaattagacgaaccatcttaaccattgctatcttggcagtcggttatctcggtggtcgcaacaatgtcttacaaaatgtgttccctgctacagttgctactgagcaaccagctaaacaaacacccccagtcagtcctgattatcaagccattgctgatcaagattttaaaagcggatctgcggcctatctaccaattaataacgatcaaagccaattaacagcaacggattggcaaggtgaaaaaatcgtctatgggcaactcgaccagcttaaccgaacaactagcgtcacagcttacttatcaaagcggaatctgggcaaatcagaaggccggacgcgccaaatttggaatccaacgggttggcataatcaacctctgattgtcaatgaccgccgaatcacaccgcaaaatcgtggccacttgattgcttatacactcacttttaattttgatcagaatggtaactttcaagctggtcaaccaggcagtttagataatccacttaacctcgccacccaaagcgcgtacagtaatcagaaaacgatgcagatttttgaagaaaaagtccgcactgcgctcgaagcaaacaaaaaagtgatttacaaagtcaccaccgtttttcggggtaatgaactgatgccgcgcggttactgggttcaagccatttcaacagatggcacgctgaatttcaacgattacgtctggaatgttgaacctggcgtcgcattcgattacatgactggtcgttctcacttagatgctagcatgcaagtcaaagacggtcagaatattgttgaccgcaccaaacaacaagtcaaacaacttttctaaacaaaaaaaaagaggtagcaaccagaataattctagttgctacctcttttgctagcttatttttccattgccttacgcaatgcagcggctaatggactttccgctggttcatcttcttggttcactttttgaatcaagcggcgttcttcatgtttagagattttcttcttacgatctttcttgtcgagcatcttttcggtcgtcccatcattaagacaccggaagtatgcgccgccttgcccttcaataatcaccattttcttgtgacattgtgggcagcggtggttggaaaccttcggatctttccgacgccgatagtgacagtttgtgcagacataaattttaccgtcacgcgtattgcgttcttttaacggatgatcacattccggacattttttattcgtcactgcaaaatcgcggtattccgtctcactctttttaatctcaccgaccaaggtcttagtggcaccctcgatttcagtgatgaacgccttcggattttcttcgcctttggcaatcgcttcaagcgactgttcccattttcctgtcagttctggtgaaaccaaggtctgattaaccaattttaaaagttgctgaccttttggcgtcactgctaaagcatgaccttgtcgttctaggagttcactacggactaatttttcgatgatttcagcacgagtggctggcgtccccaaaccgtagtgttccatcttcccgagcaacgttccttcagttaatggcttagggggcgtcgtcaattgttctttaaccgcaaaattagcccgaactaccatcccttctcgccagtcgaccgtcgcggttggttgcccctctttatcggcagcatgccaaccttgttgcacgacttttgtttgcttaaacgtaaaggtttgatcaccaaacttaacggtggctttcgtaacagctgtcacgtatggatcagcaaacaaccctaagaagcgttccacaatcaagcgatacatgcgcagttcatccgtcgataatttttcggcacgaacgggttcttcagttggaattaaagcgtagtgatccgttactttgccatcattaaagacggctttttgtttgacctgactgccttgccccaagtattgcttagcacgtggatcaaatttgactaatgccgacaaccgttccttcaaagtcccttcgatatctgttgagagatatttcgaatccgtccgtggataactgacaactttatggatttcatacaatgattgaatcaaggataacgtctttttcgcggataaaccatactttgcgttggccacttgttggagttccgttaaatcatatggtaaaggtgctgattgcgatttctgcgttgttttgacgctgaccacttggcctttggcttgttgcaattgtgcaactaagtcgtctgccgcttggcgcgtcttaatactttgcggatttgctaattgtaaggcggcttgctgttgatcgaccgtcaagtgaattgtgtagtaggtttgcggtttaaaacgattaatttgttgtgccgtttcgttcacaaaggctaacgttggtgtctgcacccgaccagcggataaattatcttcatacttggtcgtcaatgcccgtgtcacgttcaagccaatcaaccaatccgctttgccgcgtgctaacgctgatgcgtacaaattatcgaattgcttggctggttttaagtttgcaaaccctgctttaatggccttagtcgtttgcgatgaaatccagagccgttcaaccggcttatcgaatttaatccattccaaaatatagcgcgcaacggcttccccttcacgccccgaatcagttgcaatcaccgcacctgaaatatctttgcggttggcgaggtgactgatagcttttaattgtccacccgttttaggcaatggctttaaaccgatatgcttgggaataatcggtaagtcttccaaacgccattgttgccattcttttttgatatcctctggtaattgcagcgataacaaatgcccaaacgcccaagtgatgacgtattgatcgccctcaaaataggttttagttttctgagttgttcctagaactttagcaagctctttggcaacacttggtttttccgtgataactagttttttttgcatttaaaattcctcttacttcaattgatcaaaatagtaactgactaatagtataacgcatgttgagaaggaacaacccagaaatcgcgaaagtatcataaataataatatttcaacagccaaaataaaagattctaagaaactgaattcttagaatattcttttttataataaaaaaataaaagcgtgctagtcgaggctgactagcacgcttttttgcgttattgaaaagaaataacagttttaccaacacgttaatggatagcgattgagacgagcaggatgtttggtccctataaaaagccgctccagaaagctattcatgctgcgcgctgttgatgggtgcaaataacttaatgcaatataatgcgctaagtccaacaaggacatatacgatgcgcgaaataatagctgcttgaccgccaaataacatagcgactaggtcgaatttgaatagaccgacaagtagccagttcaaaccaccaacgattaataaagtaagcgcgatattgtctaaggttttcatagtgacacctcctttagtagttaagataacatcctcaaaggtggggaacaataaaattgcttagaccaagttttgtaacttagcaaagaattaagggtggttttttagaagatagattgcaaaaaaagcatgctagtcaaatttgactggcatgctttttggtgtttattgaagcatatcgattagtttcagaaagatcatcatcacgaggatgctgacccaaaagagcacattcgatttcttcttaagttggtcatttttcttttgttgggcgatgaataagatgactgatgaacttaagacgccgattgcagcaatgatcacgatcaataataaaatgagatgttgagcaggtgacatgatgaggctcctttaactgattgattctaaggagcagtataccaaaaaaatggagagacgagaatagtgaatctacctgatgaagcattaactcttggtaagatacatcgtttttaattggttgagatccgccttagtcaaacccagcccgtgtttcaaataaccattaacgccaccatattctttgttcattgtgtcatatgcggcctgtagatagggtttacggacggccatcattgcagtgatcgttttaacggctttggggttattgtgagttgccaccttaatttgttcaattgtcttttcattttcggcgcggcgatatttattagaggcgaggtagtcgtccatgatgctcttttgatcaaccccgagggcactgaggactaacatagtaccgaatccggcacgatctttaccggctgtacaatgccaaagtgtcgcaccacttttattattcaataagacattaaagaactgtttatagttcgtgcgtgctgcgggatcagtaaccaatttttggttaatatcaatcatgaaagcttcaccatcaaccttatcgagattcttgaaaaagtcagcttgacttgccgaagtccctaaagacttggtgacatcatagtgattgtagtggacgttgcttaaagcgggatcgggtttagccgcaacttcgctactagtccgtaaatcaacgatgttatttaattgttttccaacggttaacttctgtttatccttcgttgttaaaccagctaattcaccagaacgaattaaccgattggctttaattctggcacctgttttcgtgacaattccacctagatcacgagtattaatcgcaccggctaattgaatgtggcgactcatgttttgtttagggacaagggtggattgatgagctgtcgattgtttagtatttttttgtggggtacagccggctgccaaaagtaataaagttgttgttgccacgtaagggatgattgtttggctcatgcgcatattgattgcttcttgtaaaacgattttttattctttacaaggttaagcataaacaataatgtaaagtgtttgttgttctagtgaaaataaagtgtaaagcttcgtaatggtttggtaaattcataaaaaaaggcctagtagtggtttaatgatacaatggggttaacttttagatatggaggatgataagatgcatgcaacgcaactattaagtgcaacggtcgaacgcgctcaagaacgattactcgatacattggaacaaatgacagtggctgaggccaatacaatgccgcagccactaattaaatcggtgacctggttagtatggcatactgcccgtgaaatggattatcagattgcggatttgaaagggatacaaccattgtggatacgtgcaggttggtcacaaaaatttgcattagatctacctgatgaaacgcaagattggtcgcattcaccagaagaagcagccaaagtgattatcatcgataaagcattattaattggttacttagcagacgcattgcaattgacgcttgattacctggctgaagttactgacgagtctttattagagataattgatgaaaattggacaccggcagttacccgtgaagcacgcttagtctcaatcgtggatgatgcggtcatgcattccgggcaagctgtttacactagaagaatggtaatggggaaataactgctaggacaggattggaatcggtttaacgaataattagtgaagggtaaaaatagataccgtatggtatctattttttgttatccggcaattgaattgcgtgctactatattaaatgtaattaataataatttggaggaattatcaatgaagacaaaattattttcagcattagcaacaatggtagcaccaacagcaatgacagtggggtcagtatcagctgacgcagttgctccgcaaacatcaaaagccgactttagtgttgttgctaaggatccaacaaacccaacagatcctgaaaatgggacattagtattaaaatcagtaccaagtttcagctttgggacaattgaagctagtgagatttatgctggctttactggtaaagttgctaaaacagctggcgctttagaaattgctgatatacgtttaggcaaatctgactggtcgttgacagctgacatggctcaattcacagatgatgctaataaactaacaggcgcaatattgaatttagattctactggttcacttggtgaaactttaacaggtgctgttaaggacgattctcctgccgttgaagtggttaaaggtaacgggaaacatggtgtcgataatttcaagatggaagcagctacgttaacattagcagcaaatccagcagccgatttagctaaagatgagagtttcacaacaacaattaattggaatctttcatcaacaacaccaactgcaccaactgcttaatcactttactattaaacgcacgaaataagtgaataaagttaacgaagcgattgatgtggagggtgaaaagtataagccagattcgtattatactggaaaattgaataaagatccgaatacaccagggattccagctaaatataaaattgctgcaaagaatgtctctaaagagaaaacggtttatgttggtgggttagcagcctacaagaaagcggcgaatctcggtgggacttggtcagttgatggtttatcagacctagctaaggcatctggttcaacgagtaattggcattatgaatggcaatttacagatggtgaggataagacaataacccccgctactaatagtggtgtttctaatcttaagggtgacattacaaatttagcgaacttaaatacggaacaaccactaacctttagtaaagatagtactttcatgaaagatgctgcagctgcaactacggctggaaagagttatcgagcacagctaacattaacgactaacgtaacggaagaatcaagtggaagttcaaaaaaagttacgattgtttctaacgaagctgaattacaagcgcaaccagcagttggtaagttgtcattggatcaagtgcctagctttagatttgggaacgtcttatcaaaagatatttatgttggtacaactgctcaggacaagcaatatcaggtcagtgatgggttgaaaatcacggataccagagcaacgccaggttggaaattgacagcgaagatgagtaaaatggcatcaaccacaggcaaacaattaagcagcacagccattaatatgactggcttgccaacgaacgtaggattatctgataatggtactgaaacaccgattatgacggataagatgtcgaaaacatggcaagttgctgggaaattagcattaagtgccaatccaagtattcaacttgcggctggtgatacattctcgagcaacattacgtggactttaaatagcgcacaacccgcagcaccagcggcttaagttgttgattagaattaataagtaaattaaaaaagatgaatgatttcctgaatatcagggaaccgttcatctttttttgttagtcgatatatttaacagccgtgccataagcggcaactgattgcatatctgttccgattgaaccggaatcaaagcgcatcatgacaaccgcatctgcgcccatttcaagtgcattttggcgaagccggtcgatggctacatcgcgtgattcagtcatcatttcagtataggctttgatttcgccaccgacgacatttttcaatgaagcgccgatgtttttgaagacgttcttggattgagtggttaaaccgaaaacttcaccgagcacttcatattttttaccaggaatagtttcggtggtggtgatgagaattggatttgtcatgattaaagctcttttttagaagaataagattaacaataatgtgattaaagcgggtaagccttgtaagaagaaaattttcttggtggcggtaaatgtcccgtaaagggcaacgatgaagatgtagagcattaatagggcgaggacaatcttgagcgtttggccggctaataacaggttgaccatgataattacggcgcccaacattccgttataaatgccttggttggccagtgccacgcgggcatttggtagtttgacaaagtccagcggcatgtcaaaagctttcgcctttgtttcagcactggcaaacatttccagccccatgataccgatgtgttcaacggcaattagataagttaaaacaagaatcaatacttgcataagttagtgcctcctcaatggtggtttcattataacaaaaacaatgacgcatgtccaaattaggccacaaaaaaacacgccagagaatttctggcgtgttccttcatcattaaccgcggtctgtataaccgttgtttcagattgaatttctgatactaaatttcgaaggaatttcacttcatcttgtccatcaaccgcatcttttttgttgtcgtcaacatcatctttttgttgacggtatcttgttgacgaatcgtttgagagcattgctttaatagctttttgcccatcaacatcaacgtaaacagtattgccttttgttgatgtaaattgacgtaaatcgattgacgcatctctttttatcttttgccatatagcctgctttgaaacgcccaattcatcagcaagttctctaatagttttaggcatgatttccaaacccctttcggagttcagcaagtgcttcttttcttgcttgatctcttatttttttatcgtgttccgcttgtttctcagccaccgcttgtttctcagttgagcctaaagttaaccccttaactttatcaatggcgcgccatttttgatgttctgttagttcactattatgctgaatattgaaaagcttttgtctttcatcttgaaattgcccttgtgagaagtcgtctgcgttctttttttctgatttccaggtaaatgagtaaccaataaccggcttgccacggcctttaccatatttttttctaatagttagacccctgaaaagaggagttagttcttctttaattggctgaataactctggattcaacgtttgcaggtttattccaatagctttgcggaatatcaagtaattcaaaaaaatcacttttagaaaaataagcataaccagtagttcgaaattgtttaaggagacgaaacatcgtttttgcataactactctttaaatctctgaactctgctaaagcatatcgaacccagctttcaagattatttagaagtttcaatgccttggggtaaatttgaatatcaacataagggacttctgccgaacccttgatttcaaatcgagtaaacatgacaaacatttctctatcaagtccatctttacttctagagccaaatctaagacctaatattttttgatatgtactttgtatgtcatcaataaatcgattatttgcggtcggcttatacgcgcttaattcttttaactgatcaaaagtaaaccgaacagtatcatcacctttatcgcgcattctagaaacaaccgaaaagaaaagattcatttctacaggagtaaatcttctcagaggaattgtattcagttctggatcatatttaactaattcattgctcataaaataacctccttgaataatactactttatttgaatacagaagtaaataagcgtagtcgataaacagacaaaatgtagtcgataaagtcctgtaacccttaggagagtaggactaaataggggtctaaaagaggtttaaaagaggtactactgtaccagagccaaacctcaaataaaaaacacaaaggagcgactcaaaaatcggctcacattaaattcaagtcactatgctcccacgctttgctcgtccgctaccattgacagcaaacagttagtttttctgaatcttaacaagaatctaactgctatattcgtttttaagggccttatttctcgtttctagcgattttgagactgtttatatatatttataccaaagcaaaaataaaaagccctcagcaggattttagagggctaaataacgaagccaggacgattaataatatcttcttgtcttttttgcaaaatataagtatccagggaatcatacagattccttttgatctcgccaggttcattgacaaaagcttcaaacaattcttgaatatcaacttgcccaggatcagcaagcatttcatcaattggctttaatactttcttttcgtccatctgagttactcctaacattagctaattatttcaggtttaaattaaaggcatctttttatagttagttattcaaagattgtgattaagtttagaaagaaaaacggtgtaaagcaattaaaaagatttgtttgagcgtagcgaaatctaatacaatttttggggtatcaaaacacgtcaaagttagttgacgtgtaagtgcgcattgaactaaaaaaaaccttttattttaatgatcaagttagctattttttagcgtcattaaacggaatgaaatgagtttaatgcgcacttacacatagaacatctatgtgagtccgcaaaccgagcaaggctcggtcaaggcgcacttacactccactaaaaattagtggaggttttgtgcttaaaatctgtctcagaagttgccttcggcaacaactaaaaatccaaataaaactaaccaaaatcaatttgatctaacatagtttcggtactggcttggtctaagcctaaataagctaaagtcatggcttcacttgaatgatttaataagtgcatgactaagccaatattgtaattggattgcgtataaacgcgataagccccagttttgcgcatagtgtgggtaccaaggtaattaatgcttaaaagatcgccgactttgctcatgattttatagaactgtttctccgtaatatgccgttctgggtgttgaatggacggaaagagccattcagattctagtttatgatcaagcagccattgacgatacaataaaagctctgtttgaactggtttaaggtacaaggtattaggcttgcctgtttttcggtcgtgaatgaatgcattttgtttaatggagccttccggattaaagatatctgcttgttttaggcacataacgtcactgactcttagtagcgtcgctttcccaacctgaaaaattgtatagttacgctgaccagctttgaaattattgagtaaggtatcttgcacctctttgagaacgtttgaatctttgatgggtaagacaacttgttgcatagttttagctccttaaaaaattgatttttagtacaaatttaggaacgatagataacaccccaattgggcgtatgattgtcagaactttgctatcggttgcggagatggagcgtgatatgattatcgagcgtacgcaagccggtaaaatatttgcaaggcaacacaatcccaactataaggagggtagacccaaaagaaaaaaagatagccggaatatggctatctttgaatattctaactctcatactgtgaaggaagccgctgaagctattaaattattgaaaggaatcagccttttaaaaagtcaacaaagaaattctgctttaaatcatattagggtatcacaaatactttacaaatatgttttgcgtcgcagcaaaaaccagcaaattagacttagtatagcagagataatcaatacggcaaaaacaccataagaagacttttcaaacgggacatggacattgattccccaaaagccaaaaataatcgctggaatagtcaaaacgattgatatctctgttagagttttcataatcatgtttagctgatacgaaatcatattgtctatcatatcttccaaatcatccaaatattggctgtaacctaaaataattctatccattgtgtcgcttgtatcgtatatctcatcaattatttttttggtggtaaaatcaatatcgttaatagttgtgaaatttttgttaatgaaatccagcgctttgtgattagcgccataggttgttgacaaagctatcatgtatttttgaagagtcaataaatcaccaaacgttggtctgagtggaccggacgttgatatttctgattctaaatcatcaatttttcccttgactccacgaaggtcgttaagcatcacatggaaatctttttgcatgatctttaaaagtacttcctgcatgaaattattgacatcacgtaaaaccatattggataagagttcgggaatgaattttaatttttgttttgtaaaaattatcaacttattcttaaataccaagaaaacaacagatgtcgtcagattatctagatgcccaccttcatgtacctcgggaaacaaaaaacttacgagcaaacttttttcatcgttctgatctatcatcgtgtcatatgcaactcggtcatcaaacgttagtatattgcctattttaaagtcatatttatgttcaaaagattcgatatattctcgttcgtcaccataaacatagacaacagaagagtttttgatatttgattctgacgaaactaataatgtatcttttgttaaagaataagttttcagcattgtaatcctcctgctttatatttttctcaaaaataaatgcgtaattgttgtgaaataaatacgttatcagttttaaaaacattttgtcttatgtatgataacctgccaaaaattttatctcacacattatctagacaatcttgtctccagcttctaatgtattatctaatttataattatagcccctaaattaaggaatgttttagtgaccacctaggatcatagttaactcatagcaaaactcctggtattttacttagaagtcaataaattaattggactgttttactgcggcactgtatggcgtttttttattaatgaacgtagttattcaaacttgtaactaattttttaatttcgtcacgaaccttacggaattcttgtagttgttcttctaaagttcctgtggcttgcgctgggtcagataaaggccagtgtaaactcttggtttgagggggaagcataggacatttatccttggcatcaccacataaagtaataactaaatctgaagtgttcaaataatttagatcaattaatttagagtagtggctactaatatctactccatcttcagccataactttaacagcatttagatttaacccatgagtttcaatccctgcactctcgatttgaaactcatttgccggcaatattttttttgcatatccttcagccatttgactgcgacaagaatttcctgtacataaaaaataaatttttttcattctaaactacctataattttaatttgtataacaccatgatacaccataaacttaaatgcaatgctttcatcaacataggtgtataagtattaaagaaaaaaagcgcggtagatttgtaaaaatctaccgcgcttttttggattaagcaaacattttcttagttgcgcgcatcaatgtcttgatgtcacgatcataacgtggtgtatcgactaacttggccattggaatgccagcgaagtgataagctgcaatttcgccagaacgaacagcactttgttcagtgaaaatcatctgataaggttgttcaacgaattcaccagtgaaggctaagttggttgaatgttcggggatgacttctggacgctcagttttggcacgattattaaagagtgctgaagcatatggcatatagacaggaatgttattgatgacactgtccataatttcagcttctttttcacgaatattgattgggccaggatcaacttttgatagttggccaattaattcttgaagcatttccttacccgtcatttcgatgtaaggtttatccacaaattcaccgttacgacgtgggtagaggaagtaaccccagataaccgcttcgtttggtttttgcgttgtgaagtgtggttgatggtgaacaacaatcgacatattcacatctttttgaccaagtggtgtgattggtttcgttgataggaacgaattcaaagcattcccaggaatttgcgttgtaatccgttcgatttcgtttaacaaaatatgattcttagtcgttaaagtgaagctgacccactcactggcattgcggtcagcgaagaatttatcgggattgccaagattatagaatttagaagcgacttgtttccacagaccggcagcagcaccataatccatgttttcagctgctggtgtattataatcgccaagtgttgcggaatcggtaattgacccgtttgtgaagatgaccgctgtgtcgtcgtccaccgtaacgtgttcaacttcatctgtctcagtattagtcattgtcataccagtaaccgtaatttcatcggtcatctgagtctctttaaagtctaagtcagtaatccgtcgattgaggataatgtgacaaccttgcgcttttaagtagttaatcagcggcagcatgatactttcgtactgattgtaacgtgtccggttaacaccgactaagtgttcaatctgagtgaattcataaatcatttggtgcatgtaacggcgtaattcttgtgcggaactttgggttctgaaagcaaaggtggtttcccacatgtaccagaagtttgtttggaacatatgtggatcgtccttgaagtattcggcaattgaaacgttgtctaatttttcttcttcagaatcgggcatcataatcaatttggtcattaataaccgatccttattattaaagccgagatgaccagcatccaaaatacctttactaccttctaataaacgtgctttgtcgaatgtgcggtgttgagcatcgaatgaacgggtatcttcttcagccgtcatattgggttcagttgctgaaggaatccgacctagaagatccattaaatcgacataagtccgatagttaagcatccgcccaccacgtgcaacgtagcccttagtattttcgagaggatggtttttattccaatattcatcggttgtttcggaaactgatgccccatcgtttgaaccatggtcatctaatgaatagaatgtaatcgcatcgccagaccaaccgccttcttgaattaaatagactgctgcggccatgttagaaaggccagcgccaatcataattgcttttttcttaatcatatgaaaaacctcctagattcagtttagaaatgacgagtgactaacggctttcgaatttttcgtaatccacagaatcgtctctaaaaagttccattttcttagctaataaacaagcaccggttgctgtaacacctacaaaaataaggctgcctaatagaaattttttcatgtttctcgcttccttccattaactacttttgatatctatattataccgcgaattcctaaaataggaagataaaacccttacataggaattatcagtggttatgatacgattattgatgggattaggccgctaaaaatcagaatagttaagtttagtttaaggctcttattagtcaggcataattcctagggaagcactaacggatttaaaaaaagtgataggcccccaaataatggttgacctcaagtcagcttgaggttgtaaagtagtcttattgattagaaaaaggagacttttaaatgcaaaaattatctgccttaacagccccaatgaccttaagcaacggtgttaccattccaggattagggtatgggacatatcaaacaccaaatgaagaaacgaaaaaagcggtcttagaagctttatcagttggctatcggcatattgatacagctgccgtttacggcaacgaacaaggtgttggtgccgctttgaaagaaagtgatatcgcgcgtgaagacatctttgtgacaagtaagctatggaatacagaacggggctatgatgctacgaaagctgcctttgcacaaacaattgcaacgttaggtgttgactatttagatttatatttaattcattggccagctaacactaaacaatttgaagccaaagatgctgaattaaatgctgaaacttggcgtgcaatggaagatctatataacgaagggaagatccgtgcaattggtgtgtcgaactttatgccccatcatttagatgcactcatgaaaaccgccgttatcaaaccaatggttgatcaaatcgaagtccatccgggctggccacaagcagaagctgtgcgttataatcaagcgcatgacatcttagtcgaagcttgggcaccacttggtgaagccagtgcgctttcgaatgaaacgattgcaacaattgcgacgaggcacggcaaaacggcagcgcaagtttgccttcgttggggggattcaacaaggtgtgttaccattacctaaatcaactcatcaagaacgaatggcgcaaaataccgatatcttcgattttgaattaacagatagtgaaatgacccaaattagtgctttggaaaacttaggcggtcaatgcatggtgccagatgacgttgatttttaagcaagtataaggaaggttaatatggcattatcaattggcgtagtcgcccaacaatatgatttgagtattccgacactacggtattatgaagaacaaggattattaccgtttattaaacgcagtccggctggtcggcgtgaattccggcaagctgatttagactgtttatgtgatattgaatgtttgaaaaaaaagggtatgcagttaaaagatattaagcaatacatcgattggcgaactgcaggtgatgaaactttggaccaacgcttggcgttgattcaacaacggcggcaaatgttggctaacgagattgaatcactgcaagtagaattgacgaagctagatcataaagaatggtattacacaaaggcacttgaagccggaacagaatccatttttacagctgactgtgatacagaatatgaacgtgcgcatcaataatcgaaaaaagaggcaacctgataggttgcctctttttgtgtgtttaaacggttaatgttttttgcataatcagatcacgttgtgcgtcgcttccgagttggaagatgtgatcaccaacttggctgaagccgaggtttttgtaaaagttaagtgcagcagtgttgtgttcccacacgccgagccatacgttagttttatggaattgttgcgccacggctagtgcatggttaattagttgtgttcccaaaccaagtcgcttaaaggactgtcgaatatagatacgttcaatctccagtgaatccggggcagctttttcagtttgtgcgccatcaatgttgagctttaaataaccagcgacttcgccatcttgataaataaaatagaagaacgaatcgggattctcgagctcgctagttaatcggtctgtattataagcttcttctaagtagttagcgagatcttctgctgcattttcagcgccaaaagttgctgtgaaagtttcacggctgatggattgtaagtcaggtagttggtttaatgtgacagcttgaattggcattgtgatgcctcctttgttgtaatagtgtcggacgtgtccctttttgacaaaatcccagtttgcggcaacgttggcactaactttgtttaggagtgcttcaagattatgggcctcgtcggtcgtcagtccagtcagtgccatttgatttgaataatcgttttcagctttgatggcgggatagacggctcgaccggcctcggtgagatagagatgtttgatcttatgattggttttgtcagggtgtcgttcaactaaaccatgcttaattaattgttgaacggcgcgcgtgactgttgcgcggtcgacttttaataattcacctagacgttcttgaatgatcccaggctgttctgcaatgcggactaagtaaaggtattgcccgcgggttaagtcatattgttggaattcaatattagcaatggattccaacgcgcgggctataaccccgattgggcggagaatttcagtcatgatggcatacctcatttcgataaaaatagtataaaatatttttgttgcatttacaacaaaaaataaagtttcgattcgttaagtacgccaaaaataagaatataattaattctcgatgtggaatatgcgctttcattttaaaatattttatattatttcatccggcaacttgacaggaccctagtacatagcttgagtggtggttctttttttattttagacattagttcatttaattaggaattcagatagggaaatatactgaaatgaacgtaactgataaagtcggtcaagagtggcaatttatactaatttttgaaattacagataaagaagctaatcagggcaccgttgatttgaagaaagcaattaactgaggtgtcttactttaattgcctagcttgtttagttgacccacttgtctagaaatgttaaattgattctattcaataaaggcgttgattgttgggaggcgatgaaagtggatgaacgcattacagaataccgggatgcggtttatgagcaggtggtcaaagtcgggaagtcgttagggaacgtgacgcgtctacaactgttgaacattcttgcgcaaggccccaaaacggtggaagtcttagccagtacagtcggcttaagtgtcgctaccgtttcacggaacctgcaaattttgaaacaaacaaacttagtggcgattgaacgcgagaagaattttgttacttatcgtttaaattcagaacgggtcaaacaattggtaaccctcttggttgatgtctgcgaagaaactttgccagagatgacgattttggaaaaaacactcgcgcaagaaacaggtgcccccgaagcgttaactggtgacgcattgaaaacgaaattaatggcagacgatgtgtgtttgattgatttgcgtcccgcagatgagtttgcaagtcaacacttaccaggggcacgcaatgtgccatatgatcagttggatcaacgattagctgagctccccaaggataaagaagtggtggtttattgtcgtggtcgtctatgtgcttacgccaatgttgccagtcaacaactacaagctgctgggtttaaagtggcaacgtttaatcaatcagtgtgggaatggtcgcgagttatgaccgaaacggaataagatgaagcgtcctttttgacggcacgtcccaatggtggtatattatgagtaattcaatgaaatcgttgaatgattttcttgaaaagaaaggtgatcgcaatggcaacacaaattctaactgaagcaaactttaaagatgaagttcaagaaggggtcacattagtcgatttctgggcaacatggtgcccaccatgtcggatgcaaggcccaattgtcgaagaactagccgacgattacgcgggtaaagctaaaatcgccaaagttgacgttgatcacaaccaaaacttggcggctgaattcggcatccaatcaattccaaccttgttggtcatgaaagatggccaattagtgcaacaaatggttgggttacaacggaaagaaacattagcacaagaaatcaatactgccttagcttaaaaatagcttgaaggcgtatcacgattaaataataacatcatccgataagctcttaagtagggcatatattaggtgatgtttttttgtgttgttattttaagtaatccagcataacggctttaaagaagtcgatgtgtttgaggtacatttcttcatcaacatattcgtcaatcatgtggctagtatcattgccggggccgacaactgccacaggtaagtcaggattgtgcttagcaaggtgggcggcgtcggtaccgccagcaacgtgcatcagtggataagcttgggataacttttgtgccccgattttttgaacagcttgaatgaatggtgcttgtggattgctcttaacgggtggttggttattaatgacggtcaattccagattcatgtctacctgttgattgagttccgcaatgatggtattgaggtcagcaatcacttggtcgccagttaaggcgggggttgtacgaacccgacaagtaagttctgtgtgaccggggaccgaattaatttgttcaccaccgttgattaaggttgtgacaggcacgatatcgccgaggacatcatcaataggatgtttctgatcgaagtattgtttttgccgattgtagtaggcaagcaaatgatcaattgcgttaataccgagtgcgggcattgaactgtgcgcggttttaccagttgccgtcactttaaaatcaagggaaccgttatgggcgaaaattaagaaatgttgttcattggtttgattagccgcaaggagtttttgggccatttctgtggggaatttatcggggttatttgccaaggcttgtttatcaacgccagatggttcggcaactaataaggctgttaaatcatcggcatagccttgagcggttaaagtttgcgcaccagtttcgttcttttcttcatcgacggttgcgagtagtttgatttggccgtttagaggaacatgttcatcgtgtaattcgatcattgcaatcacaagcgcagccagaccagacttcatgtcgattgcgcctcgaccgaagagtttaccatcgcgagcggttagagtgaagggatcactcgtccatttgctgcgtcaccgatgctgacgacgtccatatgaccagtgacaccgaggactttgtcggttgcttcgcctagataggccactaagttttcgcggcctggtttagaagccactttttcagtatggataccatgttgtgcgaatagatcggctaagtagtcggcaatcacaccttctgcttggtctgttgtatcaattgagaccagtttttctaaaattgcgattttttcagttttttccatcatcaaaagacctccagataagattcaatatgcattatagagcccctattttgggaaagtaacggacataaattaagcaatttcgcaaatcaagtgggttaaaaaagccgtcaagcttagcgtggcggctttttattggtctggttggtgagggcttctttaaaagcctgaccggcgcggtttattcgttaaaccagtgcatatcaaacagaacgcatggattggtgccggcgcaacgattttaccgggggtgacggtcggtgagaatgcgattgtcgctgctaacgccacggtcaccaaagatgtaccagacaatatgattgttgccggaacgccagcgaaagtcatgcgtcaaatcaaattagaaaaggagttttaacatgtcaattcaaaataaagtcgtgatcattacaggtgcctcatcaaggattggggcagcaactgccaaattattagtaagcaaaggggctaaggttgttttagcagctcgtcgtgaagatcgtttacaagctttagcatcagaaatcggtgcaaatgcgatttatcaagcaacggatgtgactaatcgggatcaaatggcgagcttagtccaattggcgcttgatcatttcggtcgcgtagatgttttatacaacaatgccggcgtcatgccacaaggaaacctgagcgaacgcgattatgatcaatggcaaaagatgcttgatatcaacatcatgggcgttttaaacgggatcggtgcggtcttaccaacgatgcaagcccaacaagatggtttgattatttcaactgattcggttgccggacatgtggtttatccagcttctgccgtttataacgggactaaatatgcagtgcgcgctattatggaaggcttacgccaagaagaaaaagataacggcattcgttcaacaattgtttcaccaggggctgttaaaacagaattggtgaatacgattggcaaccctgctgttttcgaaggggttaagcaattaatggatgcaccagaagaatcagcgttggccctcaatccagaagacattgccaacgcagtcttatatgcgattgaccaaccaaaacatgtagtggtcagtgaagtcttaattcgcccaactaaacaacaagtttaagaaaagtggtcgactaagcgggtagtgcgtgcggattagcctaagcaggcgaataactgatgcagtcagtggtttgactgatgtagctaaacataaggcattgcttcgacgagcgcgtttcaaaatggtatttagtaactgagcataaaaaaatcaccttaatctgtttttaagattaatccaaaaaaataaccgtctaaactttgacgagtcacggttattttttaccaaaaacttgccaccgtcttaagcggactgtggagaagagtcgtgttgtcgcacggctctttttctatgctttcattataacaccgacttttaaaatttgcactagtcgtcaattcaaacaagcaaaaaagcccccgctaaatcaggcttggcgggggctttttcattgattatttatcttcagtgacttcttcttgaacagtttcaacagcggcggctgcttcgtctttggcttggccaaatgcactcttgccgtcgatcacgatatcgtcgaaatcttcttggctagcttcaaggctgccgccaaattgtgatttcaagtctgctgttttttcatcaaattgtgcttttgcttgttctttgatatcagacgcattgtcttgccaatcacttgcataatcatggacgcgattcatgtgtagctttgcgtcgtcttttaagtctgctgctgtttcacttgctaaatagtagtagtcttgtgcgcgatccattaaatcatcacctaagtccactaattttgattgtaattccttacccgtcttaggagttaacattaatgttgcaccaatggctgctgcgccaccgactaatacacctaatagaaaatgtcctttttttgccatgagaattactccttatcctttgtttgacgtcgattttggtaaaatcttaatgcacttgcgccaaccttcgaagcgaccgttgccttagcggttgtccgcccaacgttggtaacatgttccgttaaattgcgacttgccgtattcaaacttgaaacgctctcgccaagttcgccagccgctctgaaaacaggatccaagtcagcgactttcccgttcacatcgtctagcaatacgttggctttgctgagtaaaccttctacttctttagataaaatatcaacattctcagtaacaaccgtgacactcttgttggcttccgttactgttttagaaacatccgttaatacttttgtgacttttaatagcatcactattagaaaaacaactaggaccgcaaaagcccctgcggcgattagcgccgcaatttgaccacccgtcattgatttgttcctcctacttcgttatctattacattgtctcttaaagactagaatagcattatttcccttaaccttcaattatcttcactatattaggtgccattttttctgacatttgctaaactaaagacatgctacaaaaaaggagtttcacgcatgttcacacgtttattagcggccgcaccaactccggtcgaatctgttcagaaacagaccaatatttttatgcgctacatcacttcaattgactgggataaattactcagcaccctcgttgctggattgtttcaaattatcctactctccgctttattctacctcatcaatcgcttaggtaaatacatcattaagcgtagcttcagaaaataccgcaaaactgatggtttctcaagtaaccgcatgaacaccatttatactttgatggtcaacgctttttcatacctcgtgattttcttctatctctatgcgctactcagcgttctcggcgttcctgttggtaccttgattgccggcgctgggatcttcagtttagccattgggttaggcgcacaaggtttcgtcaacgacatcgttaccggttttttcatcctcgcagaacaacaattcgatgtgggtgatatggttaaaattggtacggtagaaggcaccgtcaacgcgattggcttacgaaccacacaagttcaaagttacgatggcaccttaaatttcattcctaaccgcaatatctcgatcgtcagcaacctatcccgcaatgatatgcgtgttctgattaacattcgcatcttacccgacaccgacttacaactgttagcggcaaccgtcaatgaagtcaatgtgcaactggtgcccaaacatcctgaaatacaagatggccctacgattctcggggtaaccaccctcgcagatggtgtccttgcttaccagattgttatgcacaccactaacggcgaacaagctgccactaaccgtactttcttacaggcttacttgcaagccttgaatgaagctggtgtcccattaccttcaacacccgttacaattcccaccaaataaaagtcccctcatataaaaaggagaaccgcttatgccacttattaacgcactcaaaggcgccctaatcggcgtcgcactcgtaatacctggtctatccggcagcattttcgccgttatcgttggtctatacgaaccgcttctggcggctatcgcgcaattcaaaaaagattggcgccaagcaattggctttttatggccaatcgggattggcgctgggatcggcgtcttactctccaccaaaatcattctttggttatgcaccgcttatccactagcggcatacagtttcttcatcggtcttgtcgtcggcagtctcccattcatctggcgtagactcgccggactcaactggcaaaaagtgttaatcgccatcgtctgtggcgcaattatgctactactcacccagattggtggtcaccaatctgaatccgacatcgctatcaaacaactcactaccctccaagactttggcacgttactatttgccggcttcttctcagtatcactcatgctcatcccaggcgtctctgggtcaatcatgctcatgattgtgaagcaatatggcactgtttatcacgctgtcagtcaactactcgacttaatggtctacctcgtcacaggacgcttgacacaagccacagaagcgttcaaaagcgtcgcgctcctcttaccgttcatcattggggccgtcatcggaactgtgattgttgctaaattaatgcactacctattagcacacttcgtcgaatacgtttacgccggtgtgctcggcgttgtcattgccgccatctggattcttgcccaaaccggcgtcgcaccagcctggccagccctaacaaccgccacagcactactaggacccatcgcactcatcatcgctatgatcatcctaggcacaatcgcaacaatctacttcgacaaagcatagagtgctgttaaagcgatttgcctctgagcattaattaaaaatgagcctcaatctcgtcttttgagattaaggctcattttagattaagcggaaggtgttgcaattaaaaagcacgtttccacaaaaaaactatccacacccttcccaatcaggttgtggatagtttttatttattatagtgctttaatcgctctaagatgttcaatggattgaagtcaatatttgagacagattttaagagacattcagaaccgcgtttaccttccacagctcaaataaatcattaatcgcgataataacttatttgaaccctggaaagcattaaatcaggcggccatttggctcgtaagtgttgcaatttcaacttgtaagggggtctggtagcccagtgaactatgaattctcttcctattgtagaaagcatgcacatattcaaaaaggacggcaaaggtgatttttttaattaagtgcaaccaagctgataatcaaaatatgaaatggatgacaacagcttttttaggctaaaagtcgtataatgacagtattctaaatgaaattggagatcataatatggcagaattgatgcgtttttatcaaagctttcaaccggaacattatcaagtttttctagatattaatcgggctcaaaaacaatttagtggtcggacgacaattacggggactgctaaagaagcacttgttttaattcatcagaacggtttagtgattgaaacagtgacggctgcaggtaagagtgtgccgtttacagttgataatgacgcaaatgccttgaaagtcgaagtcggccaacctggcgaagtgactttggtaattgcctatactgccgctttaacggattcaatgatgggcatctatccttcttattatcaagtcgatggggtgcaaaaagaattaatcggcacgcaatttgaaaccaattttgcgcggcaagctttcccatgtattgatgaaccagaagccaaagcgacttttgatttagcggttaaattcgatgagcacgaaggcgaaacgattctgagcaacatgcctgaaaaagaagtcatcgatggcgttcaccactttgaaacaacggtccggatgtcaacgtaccttgtggcctttgcttttggtgaattgcaaggggttcaaactaaaacggagagcggcgtgcaagttggcgtctttgctactaaggcacatcaagcaaacgaactcgattttgcattggacattgctaaacggtcaatcgaattctttgaagacttctaccaaacaccctatccattaccccattcatggcagttggcattgccagacttttcggccggcgcgatggaaaactggggcttagtcacttatcgggaagcttatttattactcgatcctgataatactgccttggatacgaaacaccgcgttgcgactgtgattgcgcatgaattagcacaccaatggtttggtgatttagtaacgatgcaatggtgggacgatctttggttgaacgaaagttttgccaatatgatggaatacgtcgcaatcgatgcgttgcagccggactggcatatttgggaaagtttccaaacctcggaagcagcggcagccttacaacgtgacgcgactgatggggtccaatcggtgcatgtgcaagtcaataatccagccgaaatcgatgcgttatttgatggcgcaatcgtgtatgccaaaggcgcccggatgctcgtgatggttcgcgctttaatcggtgacgatgctctacgcgctggtttgaaagcttattttgcagcacatcaattcggaaatgcgactggcgctgacttgtgggcagcactggggaaagccgctaacttagatgttggggccattatgcgttcatggctcgaacaaccaggttatccagtggtaacggccaaagtcgttgacggacaattaacgcttaaccaacaacaattctttatcggtgagggtcaagaagttgggcgtcaatggcagattccattgaagagcaactatgcggcagccccattattgatgattgaccgtgaattggtactcggtgattatgctcaattacgcgccgacaatgggcaaccattccgcttaaacgtggggaacgaatcgcatttcattgttcattacgatcaaacattattagatgatattttaaatagtagtgctgacatggcaccaattggacaactgcaactactgcaagacttacgcttattagctgaaggacgtcaaatttcgtacgcagatgttgtgcctgttttagcaccttttgccaagagtgattcaaatgtcgtggcagatgccctttacacggttgctggcaacttgaagaagttcgttacaccaggagaagaaagtgaacaacacctgcgtcgattctttgaccaattgagtaaagcgcaagttgcgcgcttaggttggatggttcaaccgactgatagcaatgacgatcagttaatgcgcccaactgttttaagcgcagccttatacgctaaaaaccaagcagccattgatgcagcccatactttattccaagcgaaccaagaaaaattgatcaccttaccagccgcaattcgggtactggtcttgatgaatgaggtccaaaacttcgggaatgccgcgctttatgaccagctcttagcagcttatcgccaaacgagtgatgcgagctataagaatgatttgactgcggccttaacgcgcacgactgatcctgaattaattgcgaccttaattggaaaatttgaagatgccagcaccatcaaaccacaagatttgcgggcttggttccgcggcttactcgccaacgacaagagccaacaagcaacctgggattggattcgcaacgattggcaatggctagaagagacagtcggcggtgatatggaatttacaacgtatatcacctcgattgccgcaatctttaagaccccagaacggttggcagagttcaaagccttctttgaacctaagctcaacaccccaggcttaacccgggaaattacgatggacattaaagtcatcgaaagtcgggttgcattgattgaagatcaaaaagcagcggttaatgaaacaattgccaaacatatgtagtcgaacgttgtgcaagttaaattcaatttgaggggttttgagatgacgattaaattagtcgcgattgatattgatgatacattattgagttcacagcaccaactgctagccagtacgaaacaacaagttgctaaggccctggaacagggtgtgaaagtcgttttgtgttccggacgcccattagctggcgtggtgccctttttaaatcaactagggattgccggtgataatcaatacgtgattacgtttaacggcagtattatcgaaacggcgtctggtaaaatcttgaaagaagctggcatcagccgagaaacctaccaagcgattgacgactactcgcaagcaacgggcttaccgtataatgtgctcgatcaaaatagtgtggtttatacgagtaatgtgaatgttgcaccaatgacggtggtgcaagcttgggaaaacgaagctggtattcatattcgcaaaccgaatgaaatcgacgcggccacgcagatggtcaaagcggtctttacaggggccagcgaacagttagatgcacatgaaccacaggtacgcgcgcaatttggaactgataattatgttgttcgtgcggctgacctctttttagaagtgatgcacgctgatgttaataaaggcaaagcagtgcaatacctcgcgaataaacttggattcgcgccggatgaaatcatggcgattggcgatgagaaaaatgacatcccaatgttccaatttgccggtactgcggtgacaatgggcaacggttcagctgaagcataagcatggcagtaataggtcttaataccatattgtgataaactttgttctttgaaaactggataataagtaatatattagttttaaaagccgagaaaacattgcgttttaaagagttttttaatagaaatatgaattagttcatatcgctaaactcaaataataaccctttaccgtaggtaaagttaggttaagttataaagggcgcacggtggatgccttggcactaggagccgatgaaggacggtactaacaccgatatgcttcggggagctgtaagtaagctttgatccggagatttccgaatgggggaacccaatacctttagtcgggtattatcattaagtgaatacatagcttaatgaaggtagacgcggggaactgaaacatctaagtacctgcaggaagagaaagaaaaatcgattccctaagtagcggcgagcgaacggggaagagcccaaaccaagaagcttgcttcttggggttgtaggacagaacattggagttaccaagttaagttgtaatcgaatcagctgggaagctgagtcaaagagtgtgataaccacgtagattaaacaacttaacctccgttctggatcctgagtacggcggaacacgtgaaattccgtcggaatccgggaggaccatctcccaaggctaaatactccctagtgaccgatagtgaaccagtaccgtgagggaaaggtgaaaagcaccccggaaggggagtgaaatagatcctgaaaccgtgtgcctacaattagtcaaagctcgttaatgagtgatggcgtgccttttgtagaatgaaccggcgagttacgtttatatgcgaggttaaagtgaaaagctggagccgtagcgaaagcgagtctgaaatgggcgagtgagtatatagatgtagacccgaaaccaagtgacctacccatgtccaggttgaaggtgtggtaaaacacactggaggaccgaacccacgtcagttgaaaatggcggggatgaggtgtgggtagcggtgaaattccaatcgaacttggagatagctggttctctccgaaatagctttagggctagcctcggaatattggatcatggaggtagagcactgtttggactaggggcccgtcatgggttactgaattcagataaactccgaataccattgatttagttccgggagtcagactgcgagtgataagatccgtagtcgaaagggaaacagcccagatcaccagttaaggtcccaaaatttatgttaagtggaaaaggatgtggcggtgcacagacaactaggatgttggctcagaagcagccaccatttaaagagtgcgtaatagctcactagtcgagtgccgctgcgccgaaaatgtaccggggctaaacataataccgaaactgtgggtggacacgtaagtgtccgcggtaggagagcgttctaagggcgatgaagctagatcgtaaggactagtggagcgcttagaagtgagaatgccggcatgagtagcgaaagatcagtgagaatctgatccaccgtatgactaaggtttcctggggaaggctcgtcctcccagggttagtcgggacctaaggcgaggccgaaaggcgtagtcgatggccaacaggttgagattcctgtactagtttattttgtttgaacgatggagggacgcaggaagctaaggaatgcacacgactggaaatgtgtgtctaagcaacaagtcttgagttgagtgaaatgcttgattctttaaggacaagttgtgatggggagcgaaattaagtagcgaagttcctgatgttacactgccaagaaaagcttctagtgagaaataaactacccgtaccgtaaaccgacacaggtggtcgaggagaatatcctaaggtgagcgagtgaactctcgttaaggaactcggcaaaatgaccccgtaacttcgggagaaggggtgctgaccgtcaggtcagccgcagtgaataggcccaaacaactgtttatcaaaaacacaggtctctgcaaaatcgaaagatgacgtataggggctgacgcctgcccggtgctggaaggttaagaggatgagttagcgtaagcgaagcccagaattgaagccccagtaaacggcggccgtaactataacggtcctaaggtagcgaaattccttgtcgggtaagttccgacccgcacgaaaggcgtaatgatttgggcactgtctcaacgagagactcggtgaaattataatacccgtgaagatgcgggttacccgcgacaggacggaaagaccccatggagctttactgtagcttgatattgagtgtttgtacagtttgtacaggataggtaggagccgtagaaatcggaacgctagtttcgatggaggcgttggtgggatactaccctaactgtatgaccactctaacccgcgccacttagcgtggcgggagacagtgtcaggtgggcagtttgactggggcggtcgcctcctaaagtgtaacggaggcgctcaaaggttctctcagaatggttggaaatcattcgtagagtgtaaaggtataagagagcttgactgtgagattgacaaatcgagcagggacgaaagtcggacttagtgatccggtggttccgtatggaagggccatcgctcaacggataaaagctaccctggggataacaggcttatctcccccaagagtccacatcgacggggaggtttggcacctcgatgtcggctcatcgcatcctggggctgtagtcggtcccaagggttgggctgttcgcccattaaagcggtacgcgagctgggttcagaacgtcgtgagacagttcggtccctatccgtcgcgggcgcaggaaatttgagaggagctgtccttagtacgagaggaccgggatggacatacctctggtgtaccagttgtgccgccaggcgcatcgctgggtagctatgtatggacgggataaacgctgaaagcatctaagtgtgaagcccccctcgagatgagatttcccattcctttatggaagtaagacccctgaaagatgatcaggtagataggctaggagtggaagtacagcgatgtatggagcggactagtactaatcggtcgaggacttaaccaaaggtgcaatgttaggcttttgaaatgaaatattacttattatgcagttttgagagaacgaagttcttctcagtgcgcaagcacaaaatagtgtggtggcgatagcaagaaggatacacctgttcccatgtcgaacacagaagttaagcttcttagcgccgatagtagttggtgggaaactacctgcgaggataggacgttgccgcgcatttattaaaagatagtggactattaatggcaatattggggtatcatgttaattgttatattaaagaaagcccgagggggatatatatatatcatgagtaaaaatagaaaatctattttgagtgtaatgttattaataataatattattagctattcttgtaggattgtctgcctacgaggggctatatccgtttggtaataagttatggatacgagcagatagttatacgcagtatagtatcttttacaaatacttaagacagcaactagtacataacggaacacttctttatagttttaaattgggattaggaggcagtttctttacaataatgggttattacttaatgagcccactaagttttctcgttgtcctttttaaggatagtcaaattatgctttttatgacaattctaatcatatctaaaatcgttctttcaggtattacattttatttgtttatcaataaaagaataaaattagactatgtttatcgcttaggattgtccatagcgtatgctttgatgtcatttaatattatttatgcatttaatgtaatgtggcttgatagcataatattaataccaattgcgttaatgggtgttgatcatttgatcaataaaggtaagatatggctactaacaggcactttaacactgttattcatatctaatttctatatggcatatatggcaggtatcggtatttttatatatttcttagtagaattaatagtccttcaaaatagagtgaaatggaaatctggcattaagtttctaatttcggtaatacttagttttgggttatcagcgtggctaattttaccaattaattatgcattgaaatcgggacccaaaatacccttgcaagttggattcttgcaacgcaagcagagtatctggatagcattgtctgatctgtttagccataatacgcaattatttgatggcgctaatatatattgcggtatcctgatgttagttgctgtaatagctttttattttatacccaaaataaaaataagaataaaagtgatagtgagcgctttagagatttgtttcttaattagttatatttatgaatatccatatgtaatgtggcacggatttcaacaacccacagggtatggattcagatttagttttttaatcagtttaatgatgatattaatcactggttttgtgattaatatcggcttagaaaatgtactaaaaccattggtatatgcggtgctattatgcagcataatattgttaacgttgtataaaaagcaggtaatagataacgggatactaattatcaatagtgtaatgttagggttgcttactttaatgatattgattggctatattttctataaaaatataggaataaatataatcaagtggttaacgttagcccttattatgacagatagtattcaaaatatgcattttgttattagtcagttggatagcttacccggatacgtcgctaccgaaaaaaattggaaagaaaatgacagtcaaaatttaaagactgctttatcttatttaaagcaggaccgaacattctatcgaactgtagtaacgccaaatgcaatgctaaaccaaggaatgtacaataattttaacgggtttagttggtttaacacttttggatatcagcaattagctacaacgttatctcaatttggatatagtactactttggggaataaatcactggcatatcaagaaggaaatacgattgtggatagtttattagggctaaaatatagaatagcattgatgaatgattctatgacttctattggataccagaaggtgttcaatagtggaaactatgaagtgtatcagaataaaaatgctttaccgatcgcaattattaatgacaatctaaccattaatcaaccactcgaaggaaatgaactacagcggcagcttctcttttttaataaaaataaaagaagtgcaatcattcgaacaatagataatccaaattttactgttcataacgtaaaaataaagcaaaaaaataatggcattcagttgagcccatatggtaagaatgcttatattgagtatcggattgatatgccagctaattcagaacttctgactaagatagctgtaattgatggtgttaattcttatggtaaattagattttaaaactaaccagattatacgaaataattatcctaattttcataatgaaggtgtattgagtctttataagagttccaatcacaaaagtaatgcatttgttaaaatgcgcttaaaaggaaatgtaaatatcgcagaatctcctaaatttatactacttaatggagatgccctaacggagaatattgaaaagttacgaaaagaagctccaaaggttataaaaaagagtgagaatagtattgaattacaagtgaatgctaaacataaagagcctgtctttttttcgattccgtttgataaaagttggaaagcaactgtgaacgggaaatccgtgttacttgaggataatcatggatttatgcaagtaccagttgaatcaggaaagagcagtataaaactaagatatattccaaaaggtattaaagaaggtttcttaataacaagcgtgacagctttaatgttgatcctttttggaattaaacagcaactagaaaaaagagttagtagggaataggtaatgaacacagagagcagaataagattaaaatggattgatcgaaaaagactaagagagattatggctcttttaggaattagtatattggtagtaacacatttggtttgtcgaaactttgttcagttttcaaagatctactgtattgaaacagctttttaattatatcacacaacttatcgtctgtcaacaactatttttaattaattattacttagaagttatagctccgtaagcaacatataatatattatcacgataaggtttaaataacaagcgttttttaaaatcttttttatttcgtatcgctgagtcatcaaccatacgtccctcgtcgagacaacttttatatattaccaagattaacaggcgcggtcaagctttttattaaaaaagctttgaaaagttaccagcaacgtttcatcgttaccaataacccttcaaagctctacggtatccctattgtttaatgagtgattcaacatccaaaatcttatcaatccagtcaccttgatagaagtcttcttcatgagtaacaaggagtacgccaccctcgaaggcttggattgcttttcgtagtgcattcttcgtatcatcatctaaatggttcgttggttcatctaatagaagaaagttgcttgatgttaatagtagttcggcaatcttcaccttcgattgttcgccaccactaagttgtttcaaaggcttcatcgcttcttcggcagttaaaccagtccgcgataaaacttggcgtagttccttttgtttctgatcagggtattcgccttgtagatactgtaatggcgttaccatattattcggccacttcaagtcttgtttaaagtaaccaaacttcaccgtactggcaatctcaaagtccccatcgattgctggaatttctttaatgatcgttttaatcaacgttgatttcccaatcccattaaaacctttcaagaccaccttctgatcacgaccaattgaaaagttcaacgctggtagtaacgcgcgatcgtaaccaatctccaaatcattagtcgtcaatagaatctgactggccgttgcatgatatggaaagcggaagttagccttcacgcgattacttggtggcgtcaaaatatccatatgtgccaattgtttctcacgactcttggcaattgtcgaacgggagcccgctttatacttgcggatataagctttcgttttttcaatcttcttttgttggttctcataggcctttaaataactagccttattctcttccttttgccggaaggcttgttgtagtgtgccggtatacttcgtaatcttaccgaattcgatatcggcgatacaggttgtcacccgttccaaaaagtcataatcatgggagattgtgataaaggcgccttcgaaatgattgagataatcactcagccaatcaatgtggttcgtgtccaaatagttcgttggttcatccagtaataacatatcgggttcttctaatagtagtttcgctaaaataatcttcgaacgttgccccccacttagttgtgatacatcatgatccatccctaatgcatcaatccccaagccagtggcgacttgcataacgcgtgtatcaatatcatagaagctttttgcctctaatagttcttgaatcgcacccgctttttcgagcaattggtcatcaaggctctctgcatagtccgcataatattgactcattaatttttctttcttatataaatccgcaaaagccgtcttcaaaaattcaaagatcgataatcctggtgctaacttcgcatactgatcgagataaccaatcttcaaattcttttgccacgtcacttttccttcatccggaagaatgacgcccgtgaggatattgattaacgtactcttacccaccccgttttggccggtaatccccatatgttcgcctttattcacttgaaacccggcgtcgtcataaagttgtttatctaaaaactgttgtgttaggccttcgacttttaaaatactcattgttttattcctactttctttccaaataaaaaacaggggcagcatccgctacccctgtcatgattacaatcattgactatcgaccactccatccatagtcactacccaaataaaccactgtcaccagtcgttaaatccagtaatgtcctatagatgacttttaatcaatattaggctctgcacgatgcgtcatcttcaaatatacagagcgaagcttcataattaatggtcgttcaattaacatgtaatcgcacccttcaataagttagtcctatcctaacatagaacaatcgttcatgcaaaagccttagctaacccgtgcacgcaacttcgctaacagctgtgcgcgtttgcgccgagaaatgattagacgcaattcaccgcggacaattggataatccttagccctaccatgcatcattgtcgctaagtcttggcttgttaatccttgattagccacttcaattttgatcatttctgctaaatacgtactatagaatgcattaaacccgacatataagcctagtactgcactgattagaatcgcaagccataaattgaaattcaaaatcgtctttaaaactaacatgccacaaataaacgcaatgaccgtggccactatccctaatatgattgtatgtcttggggcgtctttcatctgctccaccttcttaataatgattaatcgtttatatttcgtttgataaacaattgcattggattatagcgcaccaatttctgccaaatataaaaattgaagaatagtaaaatcacggtcatcaaaacattcacttgaataatattgatgacggataaattaccgtatcgtgcaaaagaagtgtataacacccaaaaaccagccgttgttaaaatagcagcgtacatcactaaacgttgcttaaacaaccgtcgcttatgcataataaccccaatcacgcgttggcggtttttcatatttcgctcacgaacaatcatgtcatcgacaattgcttgatcttttttagaaagcatcttcttcctcctcaaaataatcaaatctttgccgtacttcataggtgcccacatccgtgtaatctggaatgataatctgtggttgttcgtgccgcatgtctaatggaccatacttttgtaagtacatatcctctgctagatcgatgcgctgtctcaatcgcgtcggatcatacatccgcagcaaaccttttttcaaacgatattttcgtaatttattcaatagaaaaagccctaaaaagaagactgcaaatacggcaacgtataataaaaagtaataattagtctgtaataatatccttctaaaggccattaagtcaactggtagcggaacacttttgacagtatataagacccccgtaatggtcatcggtaccagacacattaaccatccaatggcaatcagaatcccctgccagatttttttgcccgtctttttcttagtaaaaaaccaatcattcgtcaacgatgcctcactcacttgatgcgtgatatagtctggtttagtcatcttgattgccctcctcttttgtcttagcgacgacctctaccgaacgttttggtgacttccaaacgccagcatcctcgcctttaagaatctgaataatcgttggtccgatttcaaccgccacggtgaaagtattcaccatccaatagattaggatataccatggcgcaaacgcaatatactttaatgatcgtccacggtcattaaagtaagacgccataatcaactgaattaagcccaccacaatctcaattgaaataaaaatcgctgcaaagcagaaattggtaattagacgtgaccaatccccttggaccaagcacaacacctgaacaccaacaaacgcaatcatacttaaccagaaaaatagcgaccaaataacacttaaactgtaatcaacaataatgggtaccattgccaaatgtttaatcgggtgtctaaagacatccatcgatttcgttaacaacacatgaatcccaccggcagtccaccgtctccgttgtttgaccaactcaggcagtgtttcaggcacatccataaaaaagcgaatatgtggtgcgaaatacgcttgccaaccatgcacctgcatatcccaagaaatagcgatatcctcagttggttgttccgcttgccaacccccaacatctaagaccgccgccttacgatacatggtattagcaccagaaaatgcaaatagaccaccgtatgaaagctgcgaacgtttaatcagtccgatgatcgagttcaattcattttgttgtgcttcagctaccaacgatgttttgttgattaataacatattgccagtaatggcccctaatcgatcgccaccttctcgttcgaaatagtgcatgtatttccacaatgcatccacttccggtttagaatcggcatcattcgataataaaaattggccttttgaaaatccgagtgcaatattaaacccagcggctttcccacgattattaatgatcgtaatcacacgtaagcgcttctcaccataccgagtctgcaatcgattcaaaatagcacctgtttgatcggttgaaccatcgttgaccacaatcacttcatactgattggttggataattcattcactcttcaaggtgttcaattgtcgattcaatcgaagcttcttcattatgcgcaggcactaaaatagtaatgaatggcgtccctttttctaagtaacgtggcatatctttgcgttctaaaaataaccagtaataaagactggaaacaatgaaagataatcccccgacgattggatacgacacaattgtgtagatgagtatccttgttatgtaatctgaaaaagccatgtagtcttcacccagtccttattgttgttcgattttaatagacgccaacttcatcacggacaatcaattgctctgcaaccaatacaataacacatcaggttcacattattaaatatatttatttgaaattttatcaatttctcccaaaaaaaatatttttaatgccacaatacctatttattgcgcatcatccttaaacttattatagtaatttgctcctgggaatacccagttagcacgaccgaatatcttgattgtcgctggaataataatcagacgaaccaagaaggcatcaaatagaaccccactggctaatgaaataccaattgacttaatcgttggatcttcaaccaaggcaaaacttccaaagacagcaatcataatcaaagcggctgtaataatgactggaccactctcttgcaatcctgttttaacagcccgatttgtatctccagtggcaatgtatgtctccctaatccgtgagaccatgaacacttcgtaatccatcgccagaccgaagacaattccaatcataatgactggcaaaaatgcaataattggtgatccttcactaatatggaaaacaccatcttgcataatcaatgtcgtcaatcctaatggtgcaatcaatgataaatgctcttatactaaaaaaatggactatttttattcagtccgtaaaatgaaagtataggagtatttttatgtcaattcgttattcacaagattttaaagattcactggatcatcagctttgacgattaattgttcttgagctgtttcttttaaagtttttgctgaattcgttatactgcaattgtaagcgtatttaaaaaaatagttgaaatgggagggatttatatgttggaaagaaatttaacagttattggaagttacagtacgagagaagaagctttatccgtgatcgaacaactgcaaagagaaggctatagccgtgatgatatcattatttacaccaacaaagatgcagctacaaattttggttttgctggactgtcaggaatcgatgttaaaaccggcgtaaatggcgtcgaaacgactcacgaagatcgctcactatgggaaaaaatcaaagatgcattttctgctgatacgtacgaatacgattcaagtttaaatgaagaagctgaccatgcaaacaacgacccgctttaccaatatagagatgatatctcagctggaaaaattattatcaccgtcaataattataaaaacgacccaacacaagcaactgaaaatgttacaggcagacatgcagctggtgacactagcacaaataatttacatgcatcagatgctgcacgtgcaactgatctagatactgatactgatagtatccagcttaaagaagaacaattggatatcaataagcatgatgtgacgacgggtaaagtcgatatccataaaaatgttgtcaatgagacgaaaacagtcgacgtaccggttaaacgagaagaaatcgtgatcgaaagaaagcccggagatggtgcggctgcaactaccgatgtcaatgatacgctagaagacgacacgatcacgatcccaatcaaagaagaacagatcgatgtcaacaaacgcccggtcgttcgagaagaagttgacattcgtaaacaagaacgcgaagatatgaaacaagtaagtgaaaacgtcggccgcgaagaactagatatcgatacgagtggtgatgcccacgtagaagacttacgcgataatgatcgcaacaagcatgaccggagctagtttctagctttgattttatcaaaccttttgaacaagaacttaaaaaagattactggcagccatcagaagatggctgtcagtaatcttttttggctctttgtgtgcgttcccgcaattaaaagccaaagaagccgaaaccaacgtcttcactttggcttcggcttcttttactgaatcaactaaaagaccacgtggtttccacgtctggttttactgctcttatactaaaaaaatggactatttgatagttatagaccctatatattcatagcccctttctgtttggtgttaaagtattagtcatcgatgtcatgcactatcttgtttagctccgttttgatggaactgggaatattttctaaattgaaatgattatatatttctttatccttaagcatccttttttgtgccttatttaatttacactcattgttacccactacccattcatcctttgtacgtataaaggggttttgcgcactttcctttaacgcgttttgaacatcttcataaggtaaataaaattcaattgtagatttatttaattggtagattgtaacgtctccatcttttcaaaacgacttaattctacgggctataaataacttaatttgccagtgtataacgtttcagattaagctaccactatgctacttatgtacaaaaaaagacagcctaagctgtctcaagataaactcttttaaaattgtacgcctaatgaacctaagccagtcgcattccatttgtatccctcggagcgagcaatccgcatcaattttcggattcgttcagcgttttcattacccaataagttcttaccattcatggtccaaattgtaattccatttacggttttagctgctaccacttgagctggcatatcttctgtagataaatgttttgctgcaattaaaagaatatccttaatatgctgatcaatttctttgtgggccaaatcattatacatttcatcaattatttcgaaaacttgctcattaatagtctttgacattatatcaccttccgttaaccagaatataccacaacttcatgtttatgtcgctacttccctaatgattgtaattgcatttcactttattaaaaaagttttcaaatatctctttattgattttcgtgatgcatcatcacatcaattacacgtcgtattgacatccttcattaccttaagcagttgttgcaactggtccttcttctgctttcttctctttatctttcttctgtttccgaattttatcctttgcgcgcttataaacatctttgggactaggaagcccaaatacataaactaccatgatatcccttctttcttactttaattgtagactcaatcttacagtactacaaatattcgggattaaaaaagacagcctaggctgccttgataatattaatagattaatttatatacctctttgcccgaatctgttaaagtttcttgtactgcatttttaccgccaaacgtgccagacgccgtgaaacatagtccatttacttctaactccttgattgctagtcctaatgatgttattgaaatgtcattaaatatttcagtttttaataatccttgtgcaatatactcactgttatcaccgttcattattcctccaacagtgatgcttgctttattgggagctttcataatcggccatctattagctttctgcaatactaagagtgcctgtggtgatagtttggcaatcatagacaacacaactctcttatttgaaaagtgttcttttaaatcactatcattacttatattccttagaacgttggctaaaacatttaaggtatcatcatctgccggtgaatcattaagtatttctattaattttgaatataatgtcagaccatagggatccgtaattaagtcaacaatacattgtaacgctttatcgtggtcgtctgatttttgtacataagaagcaacgaccaaagattttttcatatcagatatgttttggcctagttcatcgccagtttcaatcacatcaaaaataagactccctaaagacccatttaatatatcaacaaccaattctcgacctttagattttcctgtatcgattgcagcctctgcatactcatcagctgttaacctctgttgctctattctttgcttaagcgtttttttatcagcctttaaaattgattctggattattgatcatttctaacaaactttctctatccataattttcaccctccaataaatctataatacaaaaccccagccataaaggctaggactattggaggtgaagtatgtgccattactggcaatatcgcaggtgtggatttgcaccacacaattgccgttttaaggcgtaaagacgctttacctattccgccactgcgataatatcctagccgggactcgaacccgaatcgtgaccgcaggtgcacttccgcgctgctctatttaagctactaggaatggttaggtccgcgatcatccacggcaacaacgtgctaaccccacgcttccagcaattagaattgaagtcgattaacctaacaaagtttgattaacgctaattgccgggtataacagatcgtatttttggcaacagcgcgaccaccgttttccgccggtgattactggccacagtttaagcgcgctttactaataatccataatactaatttatcacggaaatccggctaataaccacagacaatccgcacaaaaaccgcactttttatttcttgaactcgtgcaagtcttcaatcatgaatgcatctgcaaattgcaggcatgcccgattcttataatatctgaatcgagtttcaccatacccgctttcaagctgagctgctgttacagtgttttcttttacatagatactccatagaatcttcttttgcgtagttataaatacagtaataacaatgcattcacgtattatatagccacaaaaaactgtgtatataaccacaaaaaactgtgtatatagccacaaaaaaataaaataagtggctatataatgttataataaaagcataaagaaattcccgtctaaaagtttttctttatgcttatccaacaacacacccaaaggagtgtatttatatgactattataccagaatcaaagacaaggcaggtacagaccttgaatgaattatcaaaaagaaaagtcgttgaacataatagtttaatcacatccattgccaagatggataagacaccactcaaaatgtttgaactagcggtgtttttaattgataccgacaatccacctcaggatcagacggtttatttatcaaagaaagaaatgtttgctttctttaaagtggatgacaacgataagcatagtcgttttaaagaggcaattgaaaaaatgcaaaaacaggctttttttcagattaaaaaagaacaagataaaggttttaagtttgttagcattgtgccaattccatatgtagaatggacagattatcatgatgaggtattaattcgatttagtcctgaaattatgccctatttaattaatctcaaaaccaattttacacaacatgccttgtcagaaatttccgaattgaatagtaaatatgccgttattttgtatcgttggttatcgatgaattacaaccaatacgagcactatagtgttaaaggtggacgccgagaagaacaaattgacaggtaccgtaatcctgaaattggtatgaaagagttacgagaaatgactgatacgataacagaatacaaacgattcactcactttgaaacgagagtattgaaagaacctctagcagaaatcacaaatcataccagctttaatgttatatatgaaaaagttaaaaaaggacgcagcattgatagtatcgtctttcatatcactaaaaagcaggtggcagatgatattagttacaagttagatgatccaacttatattgacggtaagataaggcaagaagaaagtgaaaaagacctcgtatatgaagctatgaaaagtccatatacaaaattgctgatggaacatttcttgttgtcatatattgatttgacggatacggctattttgtcagggttacagaaaaatgtttatccactttatgacaaattaaaagagttacgtggtttaaagggcgtgaaagaacacttagcatatattcgagataaacaagatgactattctaaaaagaatattgctaagtatcttaaaaaatcgattggacagtatctaccaatcgttaaaaggcaggatatagatcatgagtgaaaatttaaaaacaatccgagaacttgctgaagagttagatgtgtctaaacaagccattcaatatcatattaaatcactgacaaataaaagtagacaaaaaaatgatagaggaattgttgttttgtctatcgaagaacagcgatttataaggtctaaggtagacaaacaaacaaacaaaaaactatcaaaaaaacagacaaataagagacaaacagacaaacaaaaatcatgggatatcaaccaatatttattaaatgaaatcgaagaagttaaaaaaatagagacgaacaactagcagtcaaagaacgacaattagaaaatagagatttgcaaatatctcaaatgcaaaacttgttagaccaacaacagagactagcgctgcaagataaaaaattgttagaagaatacaaatctgaaatcaaagacctgaaatcattgactacacaatcaaaaccttttgtaaaagaagaagttaatgatcataatgatttagaagagagcgccactcaggaccaaaataaatctaaaaaatggtggccatttagcaaacgaggacgagaaaatgattgattcaaaaattatggagaaaacaggggccattttgaaagattttggtaatacctatttttcagataatggcactttaaagcgccacaaagtacatagaagaccttgatacttatacacctatgttgatgaaagcattgcatttaagtttatggtgtatcatggtgttatacaaattaaaattataggtagtttagaatgaaaaaaatttattttttatgtacagaaaaactcctcgtaagatatatttataagccgttggcttacaataaaatttaattattactttgatactgcgggattcttcagaatataataggaccatggaatggatctatcgggaatttgctaaaaactcctgtagttaactctactttagtaagtccgttacccgagtctttacgctctctcccaactcactagctgttttcaatcaggcttatcttcaatgtagtagtttgaaggcggcataagtccaattggttaaaattctgttacgcgaggttgtagctgtgtaaagattttctggggaatcccgcagtatcaaagcaagttccaaataactctcgaaaggaggtccttcctgtgaaattatttgttggtttagatattagttctgaaaagattgatgcttgttttatgaccgatgatagtaacttatcaatcctaaatcgtttaagtgttgctaacgatttaaatggtgcttctgaaattaaagccttaattttaaaacatcacgcagaagtatcatttgaacagattgtgattggtatggaatcaacatcactatatagttttcatccagctatgtttttccaagaagatgcagacttaaatgcactaccaacggtagtcactgttgaaaacccatttaaaatcaagcaatattctcgtgtcttcgatgaagacaaaactgataccaatgatgccatgcgaattgctgactacttacgaattcaacgttttacaacgtcacctatcaaagaagaaaaatatatggcacttcaacgtttaacccgtactagatatcaactagttaccgaattagtaacggttaaacaacatttcttagaaaacttaacttataaatgtaatacgcttagtaaggaattaaaatcagaatctaccggcatttttagcgccacaattgtacatttaatgactgaaaactactcattagatgaattagccaatttaccactagaggacttcgtccaattgattcaaaatgttggccgcagtaactttaaaaatcctgaaaaactggttaaaaccattcagcgtgccattaaaaatagctatcagttgccgcgattaatgaatgagtcgattgatattattctcagtaccttggtagttcaaatgcgttcattacagcaaagtattaaacaaattgataaaggtatcgaaaaactagttgaaataattcctgaatatcaatgcttaaccagtgtgccaggaatcggtaaggtttatgccgcaggtatcttagctgaagtcggtcaaatcgaacgatttgatgatcaagcaaaagtcgccaaatatgccggtctatcctggaaagttaaacaatctggaaattatcagtcagaagtcacaccactaacaaaacaaggtaatcattatttacgttattacttagttgaagccgccaactcggtaaaaaatcacttacctgaatacacagctttttataaaaagaaatataccgaaaccccgataaataagcaccgccgagctattgttttaaccgccagaaaatttgtgcgtttggttgatgcgctactacgcaatcaccaactttacacaccaccaaagagtgtgttgaaggaataacgtagttattcacgcaaatctttggaatacctactaaaatttttatgaattttaagtaggcttagtttagtgttgccaattttgtaaaattacacgatatttatatcaattatcttcttgacttattaccactagactttttaaacaaaacaagagctacaaacttttaatcgagagtttgatcctggctcaggacgaacgctggcggcgtgcctaatacatgcaagtcgaacgcactctcgttagattgaagaagcttgcttctgattgataacatttgagtgagtggcggacgggtgagtaacacgtgggtaacctgccctaaagtgggggataacatttggaaacagatgctaataccgcataaaacctagcaccgcatggtgcaaggttgaaagatggtttcggctatcactttaggatggacccgcggtgcattagttagttggtgaggtaaaggctcaccaagaccgtgatgcatagccgacctgagagggtaatcggccacactgggactgagacacggcccagactcctacgggaggcagcagtagggaatcttccacaatggacgaaagtctgatggagcaacgccgcgtgagtgaagaaggttttcggatcgtaaaactctgttgttggagaagaacgtatttgatagtaactgatcaggtagtgacggtatccaaccagaaagccacggctaactacgtgccagcagccgcggtaatacgtaggtggcaagcgttgtccggatttattgggcgtaaagcgagcgcaggcggtttcttaagtctgatgtgaaagccttcggctcaaccgaagaagtgcatcggaaactgggaaacttgagtgcagaagaggacagtggaactccatgtgtagcggtgaaatgcgtagatatatggaagaacaccagtggcgaaggcggctgtctggtctgtaactgacgctgaggctcgaaagcatgggtagcaaacaggattagataccctggtagtccatgccgtaaacgatgagtgctaggtgttggagggtttccgcccttcagtgccgcagctaacgcattaagcactccgcctggggagtacgaccgcaaggttgaaactcaaaggaattgacgggggcccgcacaagcggtggagcatgtggtttaattcgaagcaacgcgaagaaccttaccaggtcttgacatcctttgaccactctagagatagagctttcccttcggggacaaagtgacaggtggtgcatggttgtcgtcagctcgtgtcgtgagatgttgggttaagtcccgcaacgagcgcaacccttattactagttgccagcatttagttgggcactctagtgagactgccggtgacaaaccggaggaaggtggggacgacgtcaaatcatcatgccccttatgacctgggctacacacgtgctacaatggatggtacaacgagtcgcgagaccgcgaggtttagctaatctcttaaaaccattctcagttcggattgtaggctgcaactcgcctacatgaagccggaatcgctagtaatcgcggatcagcatgccgcggtgaatacgttcccgggccttgtacacaccgcccgtcacaccatgagagtttgtaacacccaaagccggtgaggtaaccttcgggagccagccgtctaaggtgggacagatgattagggtgaagtcgtaacaaggtagccgtaggagaacctgcggctggatcacctcctttctaaggaataatacggaaaaccttgtacatttgcgaagtcgaaactttgtttagttttgagaggtctactctccctgaattattcatacttttcgttgcagttaaaactttgtgcaaagttactttagtgtgtaaaaaaagcagctttttgttagttttgttgtcggactgtttaaaaaaggacagacttcaccctttccctaagaaaaacattttttattttgtgagttcacagcggatatatttttagattttgaatcttgaacagtgtctgccaaaataatttatcgaacacattggtctgagataaatggacccagacttgacgcgcatggtgcgtgaccttagctgccacatggagtaatttaaaacggatcgtcccgacctgagcgtgtttaagctttgttggtaaaactaagttcttcatggcttgcagtatattataagcgaccccagctaccagcatccggaactcattggcctcaaaactagaactgtccgttttatcaaagtgaaagccacgtttaacttctttgatcaagtcttccatggaaccgcgttggtgatagagggcaaagacttgtggaccgcttaattcttccaagttggtcacgataaactcatggtcaaacagaaagttgcccgccggccgcgttgatttaataatcacacgataaggtcgtgaccaactttgaggacaatagtctcgcaggacatgccattggacttcagcttcggtgaagtcctggtcacccacttggatcaggttttcagcccgactttggagctggtagttcgcttttaaacgaatcacgaacttagcctgctttttatcacacgcatggtagatccctggagctgcgaaaccagaatctccccgcactaagacatccagggaagatccgtcataggcccgtaagctccgtaataaaaatttagtcgcaccttgggaagtatagcgattgccggggcgtaattgagcattcaacaagcagcccgataaagcatcaaaggctagtaaaggatgataaccgttggtctggtagtgaccgttataagcactcttttcttggtcaccaaacgtatcggcatgtgtcgaatctagatcaaggatcagctgatgttgatttagctgcccaagaacaaagtgagctaccgagccgagcaatgatttgactgaaaagagcccagacgctgaaatgtgattgataaagcgtgaaagtgtcggctgggaagcgaccgcttgagacaagaccagcttaaaatcaacggcgtgtgacaaggtattagccgactgatcttggcagtatcctgccagcaattgcaacagcaactgcttaaataaattgttcaagggaaaggtacaatatttacggtcatctttaaaatgcaagttatcttctaagagctggtcaaagtgaatttggtgcagaaattcagcaattaataaagttccggcatcgttcgctaactcaccaccgtcattagaaatgttgatctggtcattgaataaaagtttttcatgatgtaaagttgacataaggagcactcctgttctttgtggttttcatcgattttacaatagcacaggatgtgctctttttgtacacccaacaggtgaaaaacgaaaaagatgcgaactagcatgacaacaacaaaaagtagtccttaagggaaaagtatgaataattcaggatgaaaggtattattctagcaggcggttctgggacacgtttgtatcccatcacacgcgctttatcaaaacaattgattccaatctatgacaaaccaatgatttactatccaatgtcagtgctcatgttggccgggattcaagatattatgattatctcaaccccaactgatacaccacggtttaaagaattatttggcaacggcaatgacttagggttaaacatcgaatacgccgttcaagaacaacccaatggtttggcagaggctttcgtgattggggcggacttcatcggcgatgattcagtatgcttaatcttaggtgacaacatctattatggtggtggcctttcagaaatgctccaaagagcggctcaaaaagaatcaggcgcaaccgtttttggttatcatgtgaatgatccagaacgctttggcgttgttgattttgatgaaaatatgcatgctaaatcaatcgttgaaaagccagaacatccggcaagtaactatgcggtgactgggttatacttctacgacaaccaagttgtcgacattgcgaagaatattaaaccttcaccacgtggcgaactagaaattacagacatcaacaaagcgtatcttgaaaaaggccagctagatgttgaattaatgggccgtgggtttgcttggttagatactggaacccatgattcattacaagaagccagcagttttattgcgaccgttcaaaaacggcaaaacttgaaagtggcgtgtctagaagaaattgcttaccgcatgcactatatcgataaagcaaaagtgattgaattggcacaaccactcaagaaaaacgactacggtcaatatttattgcgattagtaaaagaagattaggggtaagtaatcatgggtaagttaaaagtcacaacaactaaattacaagacgttaaaattattgaaccagccgtctttggtgatcatcgtggattctttacagaatcttattcagatcgcgatttcaaagaagcgggcattgatattgatttcattcaagataatcactcactttcaacgcaagcaggcgttttacgaggcttacatttccaacgcggtaaagctgcgcaaacgaaattaattcgcgtggtgactggggctgtcttagatgtcatcgttgacgttcgtgcaggttcaccaacttacaaacaatgggaagggtacatcctttctgccagcaatcaccgtcaattacttgttccaaagggcttcgcccatggctttgtcactttgacggataacgttaacttcttgtataaatgtgatggctactatgatgcagaagctgacggcggtatttcattcaagacaccagaattaaacatggcagattgtaaaatttaagttgaacatttaagtggacagaaaaacccatcaaggtctttaatggtgttaccacacaatccattagaaagaaggaccttgatgagcaccactattttatcattccagaaccgtgttgtcattgaaacgcttcataatgaaggacgttccttgcgatacatcgctaactacttaggctttagtaagaccaccatctttaacgaacttcaccggctaaatagtgagtaccaggctgggctagcgcaaactgactttgaacgaaaggttagtcaacgggggcggaagtcttcgctcactaaaaaccttaaacacttgatcgaggaaaagattcaagtccagaagtggtcccctgaacaagttgcccatgtggtggggattgcctacaagacggtctataactggattgatcaaggatggcttgatatacagttgcccgatttgcctgatcatggaattcgtcgtcatcgtgctaaagaaaagcgtggtacgttcaatcacggccgctccattgaggagcggcctcataaagtcgaaactcgccaggaattcggccactttgaagctgataccgtactttctggtaaacgtaaaggtcaagctgtggctacttttgtggagcgtaagagtcgcctgacaattgttaaacggctccatggtcgcgacagtcagtccatgactcaagccgtacttgaactagctagtcaacttcaagacaagctcaagacgcttaccgtagatcatggtaaagagttcgctaactatcagacaattgaacggcgaactggtacacaggtttattttgcccatgcctattcaccgcatgaaagaggcagtaatgagaaccgtaaccgagttttgcggcgctttattcccaaaggccaagccattgaagaactaagtgatcaccaattggttcaaattaattggtatttgaattcacggccacttaaatgtcttaattggcatacaccaatcgagatcttcttgcttaatttacgtcattaaattcgttcaagttatttcttgcaatctgccaaataataaagccaaaacgtgctcccaaagtcagtttgcgtcgcttaataggtaattggtaaccatgttcatgcataaccaacgattccttgttaatgctcacgaactagccgactttgggggtgcgtttttattttaaaggtggaaggcggcttgtacacccacgatcagcattttgacgccgatggttgctaaaatcagccccattaacttggtgatcacgttcatgatgttgttgcccagcttgtccatgatttgttcaccgtagataaaaatgaagtaagcaatgactgctaaaacaacgaacgcggccacgacgatgaaggggttagttccactagccaagttcatggtggtggcaatggttccggggccggccaaaattggcatggctagcggagaaatcgcgacgttggtgttactactgttgacggaatccttaacggatttttcgggatcgtgctggatcggcgaaacgttaccttggatcatgtggtaaccaatcaaccccaaaatgattccgcccatgatgcggagtgcagcaaggttgataccaaaaatggtgaagatgtaatttccgagaaaggcaaacagtaccacgatgacggtcgccacgataaaagccagtcgggcaatcgcgttgatttccttgcgactgttatcagcagtcaaactgacgaacattggcaagttagcaaaggggttcataattgcaaaaaatgcggtgaatgaaagtaaaaatgcttgaactaaatgcatggtcgtcctccttgttaaacgttttcaatgcaatgattgttttttaattatatgggttaggtggggaaatgccaagtttggtgatttatgtaccgttattgaaaaattagacaataagtcatattaatattgttcttctaaagagagttattttgttcgccatcggcaccgattaaataagtttcaccgattttgcctttggttaaaattgcccaaacggcacttgaatgatcattcgtatgaatccaatcacgcacattttgacctgaaccgtaaagttttggtcgaatcccacttaaaatattggtaatttgacgtggaatgaatttttcaatgtgttggtaaggaccatagttgtttgaacagtttgaaatagttgcttgtaagccaaatgaacggacccaagctcggactaacaagtctgagctcgcctttgatgatgaataagggctacttgggttataacgcgtttcaggcgtgaatttttcaccaacgccttcgccgtgtcctggtaagtcttcacgcaatggtaaatcaccgtatacttcatcggttgaaacgtggtgataacgcacattatacttgcgacatgcttcaatcaacgtatatgagccgataatgttcgtttgaataaaaggtgaaggatcctttagagagttatcgttgtgactttcggcagcatagtgtacaactgcgtctgtcttttgaactaacttatcgactaattcagcgtcacagatatcgccaacaactaattccacacggtctgctggtaaaccggctaagttagcgcgattgccagcgtaagttaatttatctaaaaccgtcacgtgaacttctgggtggttattcaccacataatgcacgaagttagaaccgataaagccggccccaccagtaacaataatatttttcatagtgtgtcgatctccttaaatttcaccgtaaacaaacggattatctttttcaaattcagtaaaggttggttggttggcatctttttcagacgtaattgcttggtcaaaatcaattggccaatcacgattggccaattgattttgaccaagcaattacgtctaaaaaagatgctaaccaaccaacctttactgaatttgaaaaagataatccgtttgtttacggtgaaatttaaggagatcgacacactatgaaaaatattattgttaccggtggggccggctttatcggttctaacttcgtgcattatgtggtgaataaccacccagaagttcacgtgacggttttagataaattaacttacgctgggaaccgtgcgaacttggccggtttaccagcagaccgtgtggaattagttgttggcgatatctgtgacgctgaattagtggatcgcttagtccaaaagacagacgcagtggtacactatgctgccgaaagtcacaacgataattctttgaaagatccttcaccctttattcaaacgaacatcatcggttcatatacgttgatcgaagcttgtcgcaagtataatgtgcgttatcaccacgtttcaaccgatgaagtatacggtgatttaccattgcgtgaagacttaccagggcacggcgaaggcgttggtgaaaaattcactcctgaaacgcgttataacccaagtagtccttattcatcatcaaaggcgagctcagacttgttagtccgggcatgggtgcgttcattcggcctacaagcaaccatttcaaactgttcaaataactacggtccttatcaacacattgaaaaattcattccccgtcaaattaccaatattttaagtgggattcgaccaaaactttacggttcaggtcaaaatgtgcgtgattggattcatacgaatgatcactcaagcgccgtatgggcaatcctaaccaaaggcaaaatcggtgaaacttatttaatcggtgccgacggcgaacaaaacaatggatgatttaaatgccaattccaggcagtttcaataattgcttccatattgtcatactgtggcgtccaacctaagacttcgcgtgctttgtcacttgcggcaatcaaagtacttggatcaccagcacgacgcggtgccattgtcacaggaattgccttgccagtcactttgcgagcggcttcgacaatttccatatttgaaaaaccagttgatgagcctaagttaaaggcgttactatcatggccttcttcgaggtaaccgagggccaaaatatgggcgtcggctaagtctaacgcgtggacatagtcgcggacgttagtgccatctggtgtatcataatcatcaccaaagatggagagttgttcacgtttgccagcagccacttgtaacacgattggtaacaagtgggtttctgggtgatgatcttcaccgattgaaccatctggtttggcaccagcgacattgaagtaccgtaatgcaacgaatttaataccgtaagctctgtcagcccatttcatcatcgtttccatcattaatttactttcaccatacgggttagttgggacttgtgggtcggattccttaattggaattgatttcggttccccataagtggccgctgttgatgaaaagacgatgtgtttgacgtcgaattcattcatcacttcgagtaaggcagtcatgccgtatgtgttattatcgaaatatttaagtggtgcttgcatcgattcgggcacgattgagaaagcggcgaaatgaatcacaccgctgactttttcttgttggaagacgctgcgcatgaaatctttgtcgcgaatatcgccttgatgaattgtcttaaaatcttggaaattaacgtattcacgtttcaaaattgaatgaaaactttcaattcgcgcgttatcgccgggctgaccctttcgggagtaagaatgcttgataccatacttcgataaagtgttttcaaataagtcacttgtgtattggcttcccatatcactatgaataatttgtggtttaactgcttgcgccatgacttgggtaataacgttagtcgctagttctttagtcatctgcgtattaagttggtaagcaataacccgtcgggttactggattatagacactagctaggtaacaccaagtatggttaaggggaatgtacgtaatatcagtcaataaaataccagattgatcagttaactgcttaatcaagtttggtcgctgatcataatcagtctgagtggttggcttattgattcgtttaaccattctagatctaatccctaattcacacatttgttgatagaccagacgctgactaacgtgaatatcagactgttgatttagtaagatcgttaatcgtgggtagccatacattggatatcttaaccaagccgttaacacttcttgtttaattaaatgccggcggcgttcagttctacttggctgccaatgtagataatcatagtaggttgagcgcggaattttgagtactgataagatacgcgtaatgcggtgcccagcaagtaaattagcgttgacgacttctaacacgagggcacgccctttaataattagctttttgccatgagcaccgctcgggaaaacaggattcgaacctgcgaccccctggtcccaaaccaggtgctctaccaagctgagctatttcccgttatatgcacccagtaggagtcgaacctacaaccttctgattcgtagtcagacactctatccagttgcgctatgggtgcatttttcattatgatgccgaggaccggaatcgaaccggtacggtagtcacctaccgcgggattttaagtcccgtgcgtctgccagttccgccaccccggcttaatcataatgaaagcggaagacgggattcgaacccgcgacccccaccatggcaaggtgatgttctaccactgaactacttccgcatcttaatgccgactagacgattcgaacgcccgaccctctgattacaaatcagatgctctaccaactgagctaagtcggcataataagataactttcattgaatattcaattgaatgcgggtgaagggacttgaacccccacgtctatatagacactagaacctaaatctagcgcgtctgccaattccgccacacccgcattttggcgtgtaacttggccgatgagtcgtgacaggctcgaactgtcgaccctctgattaaaagtcagatgctctaccaactgagctaacgactcaatggaggttacagggctcgaacctgtgaccctctgcttgtaaggcagacgctctcccaactgagctaaacctccatcaataaaaattttggaggagtagcgaagtggctaaacgcggcggactgtaaatccgctccttcgggttcggtggttcgaatccactctcctccatattttttagggatatagtttaaaggtagaactacggtctccaaaaccgtcagtgtgggttcaattcctactatccctgtttatattatagcttgcatattatgtgtgaatgtagtataattattcatgttaatgatggcggtattggtgaagtggttaacacatcggtttgtggatccgacatacgtgggttcgattcccacataccgcctttattcttgggctatggccaagcggtaaggcaacaggttttgatcctgtcatgcgctggttcgaatccagctagcccaatttactttttaagggacaggatttgttcttttatggcggtatagccaagtggtaaggcagaggtctgcaaaacctttatcaccggttcaaatccggttaccgcctttgcgtttaggcgctaaccttaattggtcaaaatgccggtgtggcggaattggcagacgcgcgggattcaaaatcccgtttcctcacggaagtatcggttcgaccccgatcaccggtataattgaacattatacagttttaaaaagccttagagatagggctttttttgttgcgttaataccatggttcttttgaatactaatagttaatctacgtaatcgccaatatcagcgaatgcttgtttagcgtactctttagcgatatcatcagctgtaacgaataggtcgttagcaatctcgttacgcagcttatcaatttgctcacgcacactagcatttactagcaaccttgggccatttacattagcggtcttgtaatcaacgtcataagcttgcatataagcccatgtggcattgaatcgttgcagatagtacaagcagaacattttctgttgatcgtttaacccatcattagcagataattccttcactattttgggtgcaaccttttcaactttgtgtgcaccctttttgcttttggggtgcaccgcttttttatttggcccacgttcccatccattacgctgtttccatgatttcacggtattaatcgacacatcatatttatcagcgatgtctttgtacttcatcccagataaatagtcttcctttgcatcatttcttgattcatcatgcattacatagcaccgccctccttcttataattgtttttctccaataaaatacgccgctcattatctgaacgacgtttctcatctatcttcttctgtttaagccacttctctaaacgggcatctgctgccgtccattcaggtgtttcgtagccgtactttgaatgtattagtttcacaatgcctatcactcctttaattttagttctatcatcagctttaattctagtgccattaacattgattattgcagttatcacgccaggcaattctgttttaccatttggtgatttagcaactttaccatatatgattgctgtaatggcagctgttttccgcggtgatatttttagaacaattattgggggcattgttaatattgttgcaagtctttatatcgcttcatgggtagcaccgttagtaacgcagtcagccaaagccgcacatttcgcaatgcaagggaattcatcaatttcagtgctcagcgatggtggtgtttggacaacttgggttattgtgggactgggtaagataatgagttggggaggtatcgggataattggaatagttactttagcaattatggtctggtacaacaaatttagaagtaaaaagctagttaaagttaattaaaaaataaggagtgaaacgcaatgaaaaaattaatgattgtttgtggtagtggtattgcaacatcaacaatagcagagggtaagattaaggaatatttagaaaaagaaggtgtacttagtcaagtacaaacatataaagggaacatagcagaatatattaatcaaattgataattatgatggatttgttagcacaactattgtacctacgaattaaaatcgaaaccttttgtgaactagggctgtccaatatccaaatgggcgttcggattaattttacaatctaccataagcctaccgattttttaatattattttattcatcaatttccggcgccgacccaagctctgcctgaatcatccagattttcttctcaattgcggttttgagaccaatgaaaatatcttgggtactgaagtctttttcaacatcggatacttcaatgccgtgttggtaaaggtcttccaagtaacgatagccatcaactaagtgtgcgaggcgttctggggttattttgtcccattcaccaggccagtcttgaatcttagtgttttcggccatttcttttaaggtcgagtaaggactgccatcaagcgcaatcagccgttcagaaatgacatcgagttggctgtcaatttcttccatgaactcatccatcaaggggtgcaacttcaaaaagttgggtccacgcatgtaccaatgcgtctgatggataatcattgacatctggctcaaatcggcaacgagttgatttaatactgctttggttttcgtatatttcattagattgatctcctttcgatatggttatttacatctactttatcacgttttcaacgtggcgcactagcacaactggtcaatgaggggaataaatcttaccaagtaatggctgacgccttaggcgtcgccaaagctacgattagctatgagttggaccgagttaaaccttatgatccagaattagctcagcaagatgcagatcgcaaaaggcggaattgcggtcgtcgttcgatgctgacggcagcattagcgactttaattaccaatcacttacgattaacctggtcaccagaaaccattgcggccgcttataacttgagcactgcgtcaatttataattggcttaatcgtggctggctccccttcaaattgactgatctacccaatcggaatgtccgccagcaccgagtgagcgaaaatcgtgggaaatttacaagtgggacttccatcgaacaacggccaacaactgttaatcaacggttagcttttggtcattgggaagtagatacggtgctttctagtcgaagtgagtcacgatcatgtctggttacattcgtagaacgtaagacccgacttctatgggccatcaaagcccctaatagaacggctaaggctctaaacattgcgggagtagggtttgaacctacgaccttcgggttatgagcccgacgagctaccagactgctccatcccgcgataatataaaggagaatgagagattcgaactctcgcgtgggcagaacccacctgacggttttcaagaccgttcccttcagccagacttgggtaattctccataaaacatataaaatgtaacattgttacaatgacccgtacgggatttgaacccatgataccgccgtgaaagggcggtgtcttaaccacttgaccaacgggccatacaaaacggagaaggagggatttgaaccctcgcgccagtttcccgacctacacccttagcaggggcgcctcttcagccacttgagtacttctccatattatttagataatgggcctaaatggactcgaaccatcgacctcacgcttatcaggcgtgcgctctaaccagctgagctataggcccatgaaaagcgggtgacgagaatcggactcgcgacaacagcttggaaggctgtggttttaccactaaactacacccgcatattcatgatttacacaagatgtactagaataaagaaaaacaagaagaatgaccgtagcaacgggcaaaggtttatctttttttaataaaaatagcgctatcataaacataaggaggaaaatatgactggttatatgaatcagatattgaatgctttgttaaagaatggagattacatgacagcaaatgaattggccgatgtagttgccgtatctcaaaaaacgatttacaggtcggttaaatcgataaatgagacttataaaatgactttagtagaatcggagcatggaagaggctatttgttaaattaccagaattatttacaaataatgaagcaaactcacgaaaaagattatgtcgcattctcgccagttgagagacgaaatgtaattatattaagttgtctattcaatgcaccattcacgaaaagtatagaaaatttataccataagttttatgtgagtgaaacattgattcgacaagaggctcctatgtcaagaatccggacataaaagtacgaacaaatttgactttcaatttaaattacttaatttaggtcgggaccatctggcaatggcaacatatttgggagactgagggtgctgatgccttatatcgttccaaaggacggcaaacaattatgtcagctgataaacaatcaaaaaaacggcaacaaacagagttagaacgtcttagagaagaaaatgaattgctacaaatcgagaatgaatacctaaaaaaattaagagccttagtccaggaagaagaaaacaacaagcgcaagtcatccaagagctaaggcttaaacacaaactagtaaaaattctaaaaatagttggtatggccaaaagtacgtatgaatacattattagtcatgaaccgaacggttcatctgaccaatctgttaaacaaaccatccaaataatcaagaagaatcatccagcgtacggttatcgtcgtgtaactggtgaattacatcgtatgaatatcttagtaaatcataaaaaagtacttgtcttaatgcgagaactgcaattactatcaactgcatttaacaaacgataacatagtggtagcttaatctgaaacgttatacactggcaaattaagttatttatagcccgtagaattaagtcgttttgaaaagatggagacgttatatggtagattgtaaaattaatctacaattgaattttatttaccttatgaagatgttcaaaacgcgttaaaggaaagtgcgcaaaacccctttatacgtacaaaggatgaaggggtagtgggtaacaatgagtgtaaattaaataaggcacaaaaaaggatgcttaaggataaagaaatatataatcatttggtagattgcaaatttaatccgaatttttgacaaattattcagcattacttggtaagatgtttgccagttgagtactttcagcggcctttggttaatttatcctgataaggttgacatcgagataattcataagaaattgttgacggtgatcggttcagccgaactcatcaatccaaaccgatatttgtgaaactagcgtttcataagtatcggtttctttttggtagaaagcttcggctttcataatatggaaaaagctctccattgctgcattatctaaacatgttgctttgcgagacatactttgaaaaatgcgatgttctttcaagatatgagtccaatcttgatgctggtattgaaatccttgatctgagtggactgttgtccggtattttaaattcttagggattttcttaactgctcgattcaaaacagttgtagtaaattcaacagtagggtgtttactaacttgatggctgagaatttcacctgagaataaatcataaatacatgtgaaataggcgcgttcatcaattgtcttggttccccagcgaacttcagtaacgtctgttactagtttttgataaggacgatcagtgaagaaacgacggttgatggtgtttccagagctcagtattatcgttatcgatcccccaaaccttcaaaacgccgggccgaagatgcgggcttgaaacaacggattctgcggatctttgcggaatttaagcagcgatacggtgttatgaagatccaccatgaattgaatctggaacttcaaccactgcagcttcggtgcagtccacgacggatttcccggctcatgaaggaactggatagccactccgttaccgtcaataagtggaaagcggcttcggcttccaaaaccaaggttgaacagcgtcccaacttgcttaagcaggatttctcgaccactggtttaaatcaaaaatggaccgctgatatgacctatattcaaacgaagcgtaatggctggtgttacttatcaaccatcatggacctgcactcacgacggattatcggctatttggatgtaagctgattcctgagacaacttttaagagagggtataatgaataaatcatctctcaaaaggaaggaatttttacatgccaactcgttacgacaaagaattcaaacaaaacattatcaacctatataagcaaggcgaatcagctgcccaactggccagagaatatggcattggctattcaacagttcataagtggatccaaggccaggccaaaactcaatccggtaaatcgccagacaaaatcaaagcgatggaaaagcgactggcttcgctgtctgaggagaacgaaatcctaaaaaaagccctgggcttccttgcgcagaagtaaccaatatctttgattacattcaccaagaaagccatcaccaccaggtaaccaagatgtgccgaatcctctgaaccgatcaccgtcaacaatttcttatgaattatctcgatgtcaaccttatcaggctgaattagcacaaacagatgccgaatacaagcgatcacgatgtggtcggaaaactaagctgagcgatgagttaaagcaaaaaattctcaaccatttacgtctaagctggtcaccaggaatgattgctcacgaatttaaactagctactaaatctatttataattggctaaatcaggggagaattggtttctccttgaatgatctacctgaacatggcgtacgccaacggcgtaacgttgaccaacgatccaaatataatcaatctttggggcgatcaattgaacagcgtcccatgatgattaatcaacgtaaatgaagtgaacccccgatattggaccaaaatccaatatcgggggtttttatattgaccaaatattctaaaacattaaaaataaaagttgttcaggattatctaacgtcacccttaggttataaattaatagcgagaaaatatggtattaagagtaactcactagttgtctcgtgggttcaacgttataaggcctttggcccaaaaagactggatgtcctatcacccaaaaaaacatttgatggctcatttaagatgaatgttttaaaatggatgaaaacgaataaggcttcttatccgaaaaccgcacttcattttaatatctcaaacttgcgggagtagggtttgaacctacgaccttcgggttatgagcccgacgagctaccagactgctccatcccgcgataatataaaaatattataaccacctacaaaatctcaccaaacgatggaccttgtaggactcgaacctacgaccgggcggttatgagccgtctgctctaaccaactgagctaaaggtccaagttttttgaaaaatagcggcgaaggggatcgaacccccgacctcccgggtatgaaccggacgctctagccagctgagctacaccgccaaaaaacttaaatttataacatgtaacttacgttacaattgtccaaaaaattttgagacagtggctaacttgattctaaaatgcgcgaaacattaaaaataaaagttgttcaggattatctaacgtcatccttaggttatgaattaatagcgagaaaatatggtattaagagtaactcactagttgtctcgtgggttcaacgttataaggcctttggcccaaaaagactagatgtcctatcacccgaaaaaatatttgatggctcatttaagatgaatgttttaaaatggatgaaaacgaataaggcttcttatccggaaaccgcacttcattttaatatctcaaatggctcctatgatggaattacggacaaactgttcgatataatacatcataaaggagctttttattatggcaattaaatattcaaatgaatttaaagaatcgattgttagcttaagtcagactggccgttcggccaactcactggctaaagaatacaacgtcagtgtttcaacggtcactaagtggattaaacaagctgatcctaacaacactaaagtgctatcatcaaatgaacgtgctctgattaaagaaaataaacggttaaaagaagaacttgatattttaaaacgagcacggcagtttcataatcttcaaagaccggcactggataaacacattcctttttgagggaagcgtgaaaggattccattggcgcattatcatacggataacccttacggctgtatgagtggcggatatgtagctcagttaaacgttgattgtaatcatcgctggtatactgtgatcctaaatccgtatggataatcaggtccccagtaatggttcgatttttaaccgcgctttcaagggtctttaagactaaatcagtagccatcttttttgagaacagcggcagtttcataatcttcaaagaccggcactggataaacacattcctttttgagggaagcgtgaaaggattccattggcgcattatcatacggacaacccttacggctgtatgagtggcggatatgtagctcagttaaacgttgattgtaatcatcgctggtatactgtgatcctaaatccgtatagataatcaggtccccagtaatggttcgatttttaaccgcgctttcaagggtctttaagactaaatcagtagccatctttttggagaacgaaatactatctataagtaattctttttcagaaactgtccacaccaattttctctgataaaccctattaacgaaaaataggtttttacgataattgctatatgctattaatatacttaatccatctgttgaggtcttcatgcctatttttctccttttggtactcacattttaatgttcataaggtagattgtaaaataaagttatatttctgtgtatacgatgactattgtcatcaatggaggataacgggatcgaaccgatgacctcctgcgtgcaaagcaggcgctctcccagctgagctaatcccccgtgttggtactatttaattcttagtacaatgggcctaaatggactcgaaccatcgacctcacgcttatcaggcgtgcgctctaaccagctgagctataggcccaaaaaacgtcctaattcaataaagaactttataatccctagtcgttaaccattcaaactatgttacagtaatcctaacagtaagtttatgacggtggctaacgctcagaaatggggtgatgcctatgttgattaagcgttaccttgagaaaggataacatgtcggttttcaacgcactgatgttggcaatttcggttaccatgttagtcattgagattctgaaatttaatct
